(19) United States
(12) Patent Application Publication
(10) Pub. No.: US 2023/0067451 A1
(43) Pub. Date: Mar. 2, 2023

(54) NOVEL GENETIC LOCI ASSOCIATED WITH DISEASE RESISTANCE IN SOYBEANS

(71) Applicant: Syngenta Crop Protection AG, Basel (CH)

(72) Inventors: Qingli Liu, Research Triangle Park, NC (US); Robert Arthur Dietrich, Research Triangle Park, NC (US); Thomas Joseph Curley, Jr., Research Triangle Park, NC (US); Becky Welsh Breitinger, Research Triangle Park, NC (US); John Daniel Hipskind, Research Triangle Park, NC (US); John Luher Dawson, Research Triangle Park, NC (US)

(73) Assignee: Syngenta Crop Protection AG, Basel (CH)

(21) Appl. No.: 17/794,369

(22) PCT Filed: Jan. 25, 2021
(86) PCT No.: PCT/US21/14861

§ 371 Date: Jul. 21, 2022

Related U.S. Application Data
(60) Provisional application No. 62/966,266, filed on Jan. 27, 2020.

(51) Int. Cl. A01H 1/00; A01H 1/02; A01H 6/54; A01H 1/08

(52) U.S. Cl. CPC A01H 1/1255; A01H 1/021; A01H 6/542; A01H 1/08

(57) ABSTRACT

The present invention relates to methods and compositions for identifying, selecting and/or producing a Disease resistant soybean plant or germplasm using markers, genes and chromosomal intervals derived from Glycine tomentella PI441001, PI441008, PI446958, PI509501, PI583970, PI499939 or PI483224. A soybean plant or germplasm that has been identified, selected and/or produced by any of the methods of the present invention is also provided. Disease resistant soybean seeds, plants and germplasms are also provided.

### STATEMENT REGARDING ELECTRONIC FILING OF A SEQUENCE LISTING

[0001] A Sequence Listing in ASCII text format entitled 81594-WO-REG-ORG_SEQ_ST25.txt and 5.1 MB in size, generated on Jan. 21, 2021, is filed in conjunction with this application. This Sequence Listing is hereby incorporated by reference into the specification for its disclosures.

### FIELD

[0002] The present disclosure relates to compositions and methods for identifying, selecting and producing enhanced disease and/or pathogen resistant soybean plants, as well as to novel plants.

### BACKGROUND

[0003] Plant pathogens are known to cause damage to important crops, resulting in agricultural losses with widespread consequences for both the food supply and other industries that rely on plant materials. As such, there is a long felt need to reduce the incidence and/or impact of agricultural pathogens on crop production.

[0004] Several pathogens have been associated with damage to soybeans, which individually and collectively have the potential to cause significant yield losses in the United States and throughout the world. Exemplary pathogens include, but are not limited to fungi (e.g., genus Phytophthora and Asian Soybean rust Phakopsora pahyrhizi), nematodes (e.g., genus Meloidogyne, particularly, Meloidogyne javanica), and soybean stem canker. Given the significant threat to global food supplies that these pathogens present as well as the time and expense associated with treating soybean crops to prevent yield loss, new methods for producing pathogen resistant soybean cultivars are needed. Applicant desires novel resistance genes (herein, “R-Genes”) that can be introduced into commercial soybean plants to control soybean pathogens

### SUMMARY

[0005] By way of brief summary, the current disclosure is directed to, inter alia, novel Glycine max plants having in their genome a chromosomal interval chosen from SEQ ID NOs: 1, 2, 3 or a portion of any thereof, wherein the chromosomal interval confers increased Asian soy rust (ASR) resistance as compared to a control plant not comprising the chromosomal interval. The current disclosure is also directed to methods for conveying pathogen resistance into non-resistant soybean germplasm or plant lines. Further the presently disclosed subject matter provides novel Glycine max lines comprising in its genome a chromosome interval, loci, and/or gene that is derived from Glycine tomentella and further confers Asian soybean rust resistance (herein, ‘ASR’) in said novel Glycine max line. Methods of selecting plants containing the interval is also disclosed. Various embodiments are described in additional detail below.

### BRIEF DESCRIPTION OF THE SEQUENCE LISTING

[0006] SEQ ID NOs: 1-3 are chromosomal intervals derived from Glycine tomentella line accession PI499939 referred to herein as “Scaffold 22052”, “Scaffold 50416” and “Scaffold 46213” respectively. Scaffolds 22052, 50416 and 46213 have been mapped to a locus located on G. tomentella chromosome 20. Genetic population mapping studies for PI499939 indicate that Glycine tomentella Chromosome 20 contains chromosomal intervals highly associated with ASR resistance (e.g. as corresponding to SEQ ID NOs: 1-3). These chromosomal intervals or portions thereof may be introduced (i.e. introgressed through use of embryo rescue & marker assisted breeding (MAB), or through use of GM or GE introduction) into Glycine max lines to create Glycine max lines resistant to various diseases such as ASR. Tables 1-3 indicate single nucleotide polymorphisms (SNP) within SEQ ID NOs 1-3 that are associated with ASR resistance. Table 1 displays SNP associations for SEQ ID NO: 1 (Scaffold 22052) and Table 2 displays SNP associations for SEQ ID NO: 2 (Scaffold 50416). Table 3 displays SNP associations for SEQ ID NO: 3 (Scaffold 46213). All alleles for the SNPs identified in Tables 1-3 were determined to be significantly linked with resistance or susceptibility (p<0.05) to ASR.

TABLE 1
SNP Positions within SEO ID NO: 1 that are associated with increased resistance to
Table 1 is organized as follows: (Position ASRin Scaffold 22052, favorable allele, unfavorable allele)

(24, A, G)(2425, G, A)(3023, T, C)(3024, C, T)(3094, A, C)(3158, A, G)(3666, G, A)(4104, C, A)
(4133, T, TTGCTGCTATAATCGATTAAGC)(4155, G, C)(4156, C, A)(4157, T, C)(4159, C, G)(4160, T, G)
(4239, C, A)(4289, A, G)(4321, C, T)(4355, C, T)(4474, G, T)(4528, C, T)(4659, A, C)(4820, T, C)
(4906, T, G)(5028, T, G)(5077, T, C)(5202, A, C)(5228, G, A)(5254, G, A)(5291, T, C)(5316, G, A)
(5613, G, A)(5649, T, C)(5744, C, T)(5755, T, TGGGTCATGGC)(5758, GACAACA, G)(6029, A, C)
(6133, C, T)(6183, T, A)(6210, A, ACT)(6599, T, C)(6695, G, A)(6931, T, TG)(6937, C, T)
(7007, T, C)(7030, A, G)(7094, A, G)(7117, T, TA)(7322, T, C)(7467, A, G)(7530, G, C)
(7558, G, A)(8071, A, G)(8367, A, G)(8524, T, C)(8691, T, G)(8729, A, C)(8877, G, A)(8913, G, T)
(9001, A, ATG)(9005, A, G)(9007, G, A)(9008, G, C)(9010, A, T)(9199, T, A)(9311, C, T)(9447, T, C)
(9568, A, G)(9595, T, C)(9648, T, A)(9871, A, AC)(9896, T, A)(9911, C, T)(10105, C, T)(10319, C, T)
(10443, A, G)(10487, A, C)(10497, A, G)(10567, T, C)(10738, A, C)(10914, G, T)(10945, T, A)
(11114, A, C)(11134, C, A)(11155, G, T)(11219, A, G)(11272, C, T)(11869, A, G)(11975, AT, A)
(12370, C, T)(12403, C, T)(12474, C, T)(12567, G, C)(12734, G, A)(12997, C, A)(13052, A, G)
(13071, G, A)(13101, C, T)(13103, A, G)(13174, C, A)(13210, C, G)(13257, C, G)(13430, A, G)
(13474, T, C)(13589, G, C)(13823, A, C)(13943, TA, T)(14093, A, G)(14246, C, T)(14277, G, A)
(14303, A, C)(14337, G, A)(14877, T, G)(14907, T, C)(14926, A, G)(15061, C, T)(15405, A, G)
(15525, A, C)(15722, T, C)(15783, C, A)(15809, A, T)(15907, ATGCATAGT, A)(15991, G, A)
(16377, A, T)(16418, A, G)(16437, A, G)(16590, G, A)(16695, T, C)(16725, A, C)(16729, A, T)
(16951, C, T)(17006, T, C)(17302, G, A)(17588, G, A)(17679, G, A)(18002, A, G)(18620, G, T)
(18631, A, G)(18673, C, T)(19024, G, T)(19060, G, A)(19260, G, A)(19349, G, A)(19535, C, A)
(19559, T, C)(19693, T, C)(19773, A, C)(19830, A, G)(20155, A, G)(20235, T, G)(20382, C, T)
(20464, C, T)(20466, G, A)(20594, A, G)(21047, C, A)(21091, A, C)(21355, G, A)(21484, A, G)
(21724, A, G)(21983, C, T)(22041, C, T)(22071, G, A)(22186, C, T)(22472, G, A)(22534, T, C)
(22602, G, A)(22618, T, C)(22662, C, T)(22698, A, G)(22748, A, G)(22894, T, G)(22929, C, A)
(23208, A, T)(23466, G, A)(23529, A, G)(23634, A, G)(23644, T, C)(23676, A, T)(23735, T, C)
(23775, A, G)(23995, C, T)(24076, A, G)(24117, T, C)(24269, T, C)(24383, C, T)(24579, G, A)
(24629, G, A)(24896, T, TA)(25028, C, T)(25174, A, G)(25180, A, G)(25235, C, T)(25241, C, A)
(25339, A, T)(25366, G, T)(25373, T, C)(25561, TTC, T)(25564, T, C)(25578, G, A)(25663, A, G)
(25704, A, G)(25743, C, T)(25761, T, C)(25952, G, A)(26012, A, G)(26039, G, A)(26110, C, T)
(26211, T, C)(26652, T, G)(26808, A, C)(26856, G, A)(27216, T, C)(27245, T, C)(27280, A, T)
(27320, T, C)(29072, T, C)(29265, A, G)(29282, T, C)(29315, A, C)(29461, T, C)(29466, T, A)
(29706, C, G)(29729, A, C)(29788, G, T)(29828, T, C)(29902, G, T)(30634, G, A)(30638, T, C)
(30697, G, A)(30772, T, C)(30895, A, G)(31129, T, G)(31368, G, A)(31401, A, G)
(31432, G, GATAGAATATACT)(31484, T, G)(31505, A, G)(31807, T, C)(31809, G, A)(31877, C, A)
(31986, T, G)(32151, A, G)(32195, T, C)(32361, G, A)(32437, T, C)(32667, G, A)(32745, C, T)
(32960, T, A)(33099, G, A)(33154, C, T)(33234, C, T)(33257, A, G)(33299, C, A)(33317, C, T)
(33390, A, G)(33462, A, G)(33594, C, T)(33630, A, G)(33631, C, T)(33648, A, G)(33663, T, C)
(33673, A, G)(33686, C, T)(33734, TCTGTTTGTTG, T)(33761, G, T)(33818, G, A)(33962, A, G)
(34095, T, C)(34250, G, A)(34948, T, A)(35038, G, A)(35062, A, C)(35111, C, T)(35182, C, T)
(35191, A, G)(35209, A, G)(35258, A, G)(35296, C, G)(36091, T, C)(36302, T, C)(36403, A, G)
(36457, A, G)(36560, A, G)(36567, C, T)(36569, C, T)(36572, T, C)(36658, C, T)(36673, G, A)
(36866, C, T)(36921, C, T)(37031, G, A)(37262, G, A)(37314, A, G)(37367, C, T)(37383, T, C)
(37814, T, C)(38391, G, A)(38436, G, A)(38445, A, G)(38520, C, T)(38543, G, A)(38553, G, GT)
(38801, A, G)(38830, A, G)(38942, G, A)(39001, G, A)(39795, T, C)(39804, C, T)(39852, G, A)
(39876, G, A)(40011, A, G)(40041, A, G)(40064, A, G)(40657, G, A)(40674, A, AAAG)(40970, A, G)
(41083, TTA, T)(41113, T, C)(41259, G, T)(41353, T, C)(41535, T, C)(41603, T, A)(41657, A, C)
(41861, C, T)(41878, A, G)(41945, T, C)(41974, T, G)(41984, G, A)(41988, G, A)(41990, A, G)
(41997, A, G)(42054, T, C)(42074, G, T)(42108, T, C)(42264, T, G)(42528, G, A)(42797, A, C)
(42846, A, T)(43038, G, T)(43122, T, C)(43167, C, T)(43567, G, GA)(43653, T, TAG)(44219, T, A)
(44442, C, T)(44721, A, G)(44755, A, G)(44851, G, A)(44944, C, G)(46191, A, T)(46251, G, A)
(46654, C, T)(47940, C, T)(49197, A, G)(49459, T, C)(50139, G, A)(50348, A, C)(50359, T, G)
(51057, C, T)(51077, A, G)(52002, A, G)(52426, T, C)(52682, C, T)(52733, C, T)(52903, T, C)
(53111, C, T)(53221, T, C)(53231, T, G)(53378, C, A)(53460, G, A)(53681, C, T)(53954, G, A)
(54046, A, G)(54252, G, A)(54304, C, T)(56023, C, T)(57077, TCTGGCGCCC, T)(57118, C, T)
(57130, C, A)

TABLE 2
SNP Positions within SEQ ID NO: 2 that are associated with increased resistance to ASR
Table 2 is organized as follows: (Position in Scaffold 50416, favorable allele, unfavorable allele)

(438, C, T)(1063, T, C)(1219, G, A)(1299, G, A)(1443, A, G)(1461, G, A)(1486, A, G)(1527, G, T)(1552, A,
T)(2329, C, T)(3017, T, C)(3029, A, G)(4397, T, A)(4446, A, AT)(4886, T, C)(5131, T, C)(5902, C,
T)(6104,A, G)(6108, A, T)(6153, A, G)(6276, G, A)(6947, C, T)(7112, C, T)(7775, GA, G)(8168, A, C)(8347,
T, G)(8622, T, G)(8741, G, A)(9091, A, C)(9228, C, T)(9674, G, A)(9838, G, A)(10128, CJ)(10439, T,
C)(11269, G, C)(11327, T, A)(11466, CG, C)(11563, C, A)(11645, G, A)(12016, G, C)(12065, C, T)(12536, A,
T)(12768, G, A)(12817, G, A)(12869, T, C)(12945, G, A)(13668, G, A)(13728, G, T)(13729, T, G)(13745, T,
C)(13770, C, T)(13775, G, A)(13778, T, C)(13779, G, A)(13781, GTGTT, G)(13805, C, T)(13966, A, C)
(14032, T, C)(14217, C, T)(14379, T, G)(14483, AT, A)(15254, CAT, C)(15493, A, T)(16177, T, C)(17134,
AT, A)(17190, A, AT)(17748, G, T)(17871, C, T)(18299, A, G)(18303, T, C)(18467, C, G)(18550, A,
C)(18553, A, G)(18916, T, A)(20324, G, A)(20890, G, C)(21070, C, A)(21096, A, C)(21097, T, G)(21478, A,
C)(21815, T, G)(21836, G, A)(22463, T, C)(22585, G, A)(22702, A, AT)(23265, A, C)(23497, T, C)(23536, T,
A)(23571, A, G)(23592, T, G)(23623, C, T)(23866, C, A)(24159, C, T)(24363, G, A)(24434, A, C)(24473, A,
G)(24502, T, C)(24615, C, A)(24622, C, T)(24632, G, A)(24710, A, G)(24739, A, T)(24808, A, G)(25440, C,
T)(25447, C, T)(25452, A, G)(25488, A, G)(25492, T, C)(26693, C, A)(27180, T, C)(27195, G, A)(27618, G,
A)(27657, T, G)(27870, A, G)(27969, A, G)(28117, G, A)(28247, C, T)(28262, T, C)(28575, G, A)(28628, T,
C)(28847, G, A)(28855, T, C)(29001, G, A)(29060, C, T)(29320, G, A)(29404, A, C)(29627, G, A)(29650, G,
A)(29717, G, A)(29754, C, T)(30109, G, C)(30163, C, T)(30789, T, C)(30820, C, A)(30867, T, C)(30942, A,
G)(31035, T, C)(31080, C, T)(32249, T, G)(32322, A, T)(32331, G, A)(32421, T, C)(32596, G, A)(32626, C,
T)(33057, T, C)(33346, T, C)(33431, G, GT)(33489, C, T)(34115, T, A)(34246, T, C)(34290, A, T)(34360, G,
C)(34634, A, G)(34877, C, T)(34917, T, C)(35151, T, G)(35172, C, G)(35200, T, G)(35381, A, G)(35394, A,
G)(35407, T, G)(35427, T, C)(35493, G, A)(35497, G, C)(35512, T, G)(35527, T, C)(35544, G, A)(35583, T,
C)(35674, A, AC)(35740, T, C)(36001, ATT, A)(36098, T, C)(36105, C, T)(36118, G, GA)(36122, A, G)(36153,
C, T)(36174, G, A)(36192, G, A)(36197, A, C)(36302, A, C)(36336, T, C)(36361, T, A)(36362, T, A)
(36363, T, G)(36490, T, C)(36622, C, T)(36639, T, G)(36833, A, C)(36882, C, A)(37036, C, G)(37311, A,
C)(37355, T, A)(37406, A, T)(37660, C, A)(38194, G, A)(38395, A, C)(38780, C, CACTAATTG)(38885, A,
G)(38886, A, G)(40009, A, G)(40055, T, C)(40098, C, A)(40120, A, G)(40137, T, G)(40611, A, T)(41057, C,
T)(41149, T, A)(41256, G, A)(41293, C, T)(41673, C, T)(41716, A, C)(42049, T, C)(42087, A, T)(42280, G,
T)(42281, C, T)(42413, C, A)(42426, G, A)(42451, G, A)(42474, T, C)(42758, T, C)(43153, C, T)(43265, G,
GA)(43607, A, C)(43627, T, A)(43653, T, C)(43827, G, T)(43964, C, T)(44131, T, A)(44342, A, C)(44516, T,
C)(44606, C, T)(44791, C, T)(44799, A, C)(44800, T, C)(44871, C, T)(44956, C, G)(44971, T, C)(45259, C,
T)(45325, A, G)(45441, CTT, C)(45538, AAC, A)(45554, T, G)(45627, T, A)(45671, A, C)(45672, A, T)(45840,
AAATCTT, A)(46227, C, T)(47384, A, G)(47442, A, G)(47443, AG, A)(47447, A, G)(47448, G, A)(47590, T,
A)(47733, C, T)(47777, G, A)(47787, G, A)(48112, A, AATTT)(48579, T, A)(48846, G, A)(48924, T, A)(49348,
A, G)(49636, C, T)(51179, A, G)(51579, GTGAT, G)(51767, A, C)(51910, C, T)(52072, A, C)(52140, G,
C)(52161, C, T)(53324, C, T)(53328, C, T)(53383, A, C)(53739, C, T)(53775, T, C)(53779, ATTGT, A)(53791,
T, C)(53911, G, A)(53926, T, A)(54027, T, C)(54353, C, G)(54380, C, T)(54408, A, T)(55086, C, A)(55128,
T, C)(55152, GTGTTACTA, G)(55191, C, T)(55301, T, A)(55315, T, A)(55472, AC, A)(55513, A, C)(55541, C,
T)(55583, A, C)(55712, T, C)(55795, A, G)(55796, C, A)(55889, TC, T)(55903, A, G)(55986, C, T)(56133, T,
C)(56134, G, A)(56139, C, T)(56150, A, C)(56151, G, A)(56184, C, T)(56185, T, C)(56195, A, G)(56200, C,
T)(56221, G, T)(56263, A, G)(56264, G, A)(56310, C, T)(56364, A, G)(56404, G, A)(56409, T, C)(56426, G,
A)(56720, T, C)(56815, T, C)(56860, A, G)(56913, G, T)(57327, C, T)(57350, T, C)(57971, C, G)(57972,
A, T)(57973, A, G)(58900, G, GT)(59342, C, T)(59346, T, A)(59347, A, T)(59348, T, A)(59349, A,
T)(59408, T, A)(59433, T, C)(59487, C, T)(59492, A, G)(59500, C, T)(59522, C, T)(59544, C, T)(59778, C,
G)(59788, C, T)(60612, T, A)(60626, G, A)(63880, C, T)(63889, T, C)(63930, G, A)(63943, G, A)(63957, C,
T)(63984, A, G)(64117, G, A)(64153, C, T)(64154, A, G)(64155, C, T)(64156, G, A)(64167, T, C)(64202, G,
A)(64249, A, G)(64268, C, T)(64285, C, T)(64312, C, T)(64318, T, G)(64347, G, T)(64354, G, T)(64369, G,
A)(64374, T, G)(64388, G, A)(64433, G, GTGGGCTGTGGCCCGA)(64437, GTTGTGGCCCGATGGA, G)(64447, C, T)(64449,
C, T)(64480, T, C)(64487, G, A)(64497, G, A)(64503, G, T)(64536, G, A)(64549, G, A)(64578, C, T)(64584,
C, T)(64625, C, T)(64650, C, T)(64656, C, T)(64699, C, T)(65025, T, C)(65040, C, G)(65109, G, A)(65118,
C, G)(65154, C, T)(65225, A, G)(65300, C, T)(65325, T, TAGA)(65380, T, C)(65443, C, T)(65446, A,
C)(65471, A, G)(65707, T, C)(65715, G, A)(65725, G, A)(65752, T, A)(65805, T, C)(65821, G, GATTT)(65862,
T, C)(65870, A, G)(65878, A, C)(65960, A, G)(66027, T, C)(66143, T, C)(66171, A, C)(66263, A, G)(66295,
G, T)(66316, T, G)(66373, T, C)(66428, A, C)(66434, T, C)(66454, G, A)(66532, T, C)(66542, A, C)(66555,
T, C)(66630, C, T)(66652, T, C)(66654, G, A)(66715, T, C)(66719, T, C)(66726, G, T)(66757, T, C)(66762,
T, G)(66765, T, C)(66796, G, A)(66871, G, A)(66892, G, A)(66949, A, G)(67145, C, G)(67167, C, T)(67191,
T, C)(67194, T, C)(67212, T, C)(67224, C, T)(67308, C, T)(67327, A, G)(67340, G, A)(67351, G, A)(67418,
A, G)(67459, A, G)(67468, G, C)(67485, A, T)(67495, T, C)(67522, C, T)(67524, A, G)(67538, G, A)(67569,
C, T)(67641, C, T)(67642, A, C)(67644, G, A)(67702, G, A)(67813, A, T)(68189, T, C)(68246, G, C)(68265,
T, C)(68279, G, C)(68317, T, C)(68321, A, G)(68323, A, G)(68355, T, C)(68359, C, T)(68369, A, T)(68401,
C, A)(68589, T, C)(68630, G, T)(68712, T, C)(68716, T, C)(68749, G, C)(68789, C, T)(68803, G, A)(68806,
G, A)(68846, C, T)(68873, A, C)(68909, A, G)(68918, A, G)(68923, T, C)(68924, C, A)(68939, T, C)(68959,
A, G)(69042, T, G)(69061, T, C)(69071, A, G)(69126, T, C)(69146, A, G)(69166, A, G)(69178, C, T)(69259,
T, C)(69272, G, A)(69333, A, G)(69362, G, C)(69371, T, G)(69389, T, C)(69527, G, A)(69535, A, G)(69541,
A, G)(69578, T, C)(69632, G, A)(69643, C, T)(69690, T, C)(69701, A, G)(69827, C, G)(69877, C, A)(69888,
G, T)(69971, G, A)(69974, G, C)(70014, A, G)(70033, C, T)(70075, T, C)(70168, A, G)(70181, A, C)(70211,
T, A)(70231, T, C)(70295, G, A)(70350, T, C)(70378, A, T)(70400, T, C)(70407, C, T)(70595, A, G)(70612,
A, G)(70637, T, C)(70681, C, T)(70744, A, C)(70762, T, C)(70789, A, G)(70802, G, A)(70852, A, G)(70867,
A, G)(70888, G, A)(70889, A, G)(70893, T, C)(70919, G, A)(70934, C, T)(70937, C, T)(70944, T, G)(71073,
C, A)(71090, T, A)(71099, A, G)(71106, C, T)(71134, G, C)(71221, A, G)(71236, G, C)(71255, A, G)(71386,
G, A)(71451, C, A)(71454, T, C)(71457, C, G)(71478, C, T)(71535, C, T)(71556, CGAAGTCAAT, C)(71560, A,
G)(71637, T, C)(71658, T, A)(71660, C, T)(71668, G, T)(71686, G, A)(71689, G, A)(71699, T, C)(71753, T,
C)(71780, A, G)(71789, A, G)(71903, G, A)(71918, G, A)(71934, G, T)(72475, G, A)(72515, C, T)(72563, T,
C)(72698, A, G)(72711, T, C)(72751, C, T)(72806, T, C)(72898, G, A)(73008, T, C)(73130, A, G)(73206, G,
A)(73348, G, A)(73392, G, A)(73395, G, A)(73413, C, G)(73454, T, A)(73501, G, C)(73529, A, C)(73530, G,
T)(73590, T, C)(73713, G, A)(73719, C, T)(73722, C, T)(73756, A, G)(73795, T, C)(73811, C, T)(73873, G,
A)(73895, C, A)(73905, A, G)(73934, C, T)(73946, C, T)(73969, T, A)(73980, T, C)(73986, A, C)(73989, A,
G)(73994, G, A)(73998, T, G)(74000, G, A)(74005, T, C)(74016, T, A)(74019, G, A)(74026, C, G)(74065, A,
G)(74076, A, G)(74092, G, A)(74182, C, G)(74256, G, A)(74271, T, C)(74359, A, G)(74370, G, C)(74375, T,
A)(74522, G, A)(74732, T, TATGTATATAA)(74810, AT, A)(74874, T, C)(75094, T, A)(75118, A, G)(75257, A,
G)(75566, A, T)(75646, T, C)(75692, G, A)(75775, T, C)(75791, G, T)(75854, A, G)(75953, G, A)(76085, G,
A)(76104, G, A)(76123, G, A)(76161, T, TA)(76216, G, A)(76570, A, G)(76638, G, A)(76801, T, C)(76864, A,
T)(76925, G, T)(76936, T, TTAATC)(77060, C, CCTTGTAG)(77068, T, A)(77128, C, T)(77156, C, T)(77157, C,
T)(77234, A, G)(77245, T, C)(77266, C, T)(77273, C, T)(77277, A, G)(77290, A, C)(77291, T, G)(77310, C,
T)(77322, T, C)(77329, A, G)(77358, C, T)(77360, G, A)(77400, A, G)(77440, A, C)(77534, A, C)(77650, A,
C)(77891, C, T)(77931, C, A)(78002, T, C)(78012, AT, A)(78070, A, G)(78074, T, TAA)(78078, T, A)(78080,
A, G)(78081, T, A)(78135, A, G)(78164, C, T)(78263, A, G)(78265, A, G)(78268, C, T)(78293, T, C)(78319,
A, G)(78322, G, A)(78386, T, C)(78473, A, G)(78822, C, T)(79866, CATA, C)(80452, A, G)(80501, C, T)
(80727, G, A)(82007, T, TAATAC)(82169, C, A)(83244, C, T)(83247, A, G)(83521, GAA, G)(83589, C,
T)(84049, A, G)(84439, C, T)(85093, G, A)(85138, A, G)(85395, TAA, T)(85470, T, A)(85612, G, T)(85646,
CTTCAAA, C)(85696, C, T)(85846, GTA, G)(86026, T, G)(86066, A, T)(86142, A, G)(86385, GAA, G)(86495, TA,
T)(86540, T, C)(86552, C, A)(86609, T, C)(86659, T, A)(86709, C, T)(86787, A, G)(87056, T, C)(87057, G,
T)(87072, C, T)(87079, T, C)(87081, G, A)(87102, A, G)(87138, C, T)(87176, G, A)(87203, G, A)(87204, G,
T)(87274, A, G)(87328, C, T)(87338, T, C)(87461, T, C)(87597, A, G)(87709, A, G)(87746, A, C)(87846, C,
T)(87893, CCCATAGGGA, C)(88034, T, TTCTCTCTAAGAGATATTTCTCAAACTGAA)(88101, G, C)(88272, GCATTAGTCTGTGA,
G)(88376, T, A)(88801, A, G)(88827, C, A)(88910, T, G)(88988, C, T)(89044, T, TTA)(89253, A, G)(89316,
GAA, G)(89348, G, A)(89403, T, C)(89406, T, A)(89422, G, A)(89556, A, G)(89614, T, C)(89637, C,
T)(89710, A, G)(89725, A, G)(89731, T, C)(89742, C, T)(89764, A, G)(89837, T, C)(89863, A, G)(89866, T,
C)(89889, T, A)(89895, A, G)(89969, T, C)(90015, G, A)(90044, A, G)(90252, T, C)(90274, A, G)(90284, G,
T)(90334, A, G)(90379, G, A)(90404, T, G)(90440, C, T)(90569, C, G)(90606, A, G)(90663, C, T)(90699, T,
C)(90736, T, C)(90739, A, G)(90746, C, T)(90821, C, T)(90900, A, T)(90905, A, AT)(91079, A, G)(91080, T,
C)(91303, T, G)(91380, G, T)(91481, T, A)(91647, T, A)(91689, C, T)(91787, G, A)(91850, T, A)(91853, G,
A)(91870, G, A)(91918, T, G)(91955, G, A)(91973, C, T)(91989, G, A)(92024, T, C)(92026, G, A)(92057, C,
T)(92082, A, G)(92129, T, G)(92183, A, G)(92319, G, A)(92397, T, C)(92457, G, C)(92729, T, A)(92733, TA,
T)(92929, T, TA)(93096, A, T)(93434, C, CTTTTTACTTTTAAT)(93584, A, G)(93615, A, G)(93647, T, A)(93699,
A, T)(93781, GA, G)(93829, T, A)(93895, A, G)(94310, AT, A)(94390, T, C)(94392, T, C)(94507, G,
A)(94524, A, 6)(95229, G, GT)(95904, TTTTCAATAAAATA, T)(95934, T, 6)(95947, C, T)(95978, G, T)
(95982, A, G)(96343, GA, G)(96550, ATT, A)(96696, A, T)(96719, C, T)(96785, G, C)(97478, T, TA)(97608,
T, C)(97752, A, T)(98977, A, C)(98996, A, G)(99028, A, G)(99065, G, A)(99204, C, T)(99237, A, G)(99243,
C, A)(99273, G, A)(99282, C, T)(99293, A, AT)(99299, C, T)(99318, G, T)(99323, C, A)(99403, T, A)(99424,
C, T)(99447, T, A)(99459, TATAG, T)(99545, CT, C)(99589, G, T)(99735, C, A)(99774, A, T)(99834, TA,
T)(99887, A, T)(99931, C, T)(99937, G, A)(99979, G, A)(99980, A, G)(100028, TA, T)(100081, C, A)(100090,
C, T)(100102, T, C)(100275, C, T)(100285, A, G)(100294, A, G)(100314, C, T)(100326, T, C)(100345, A,
G)(100354, G, A)(100400, A, G)(100753, A, G)(100800, A, G)(100879, C, T)(100945, G, A)(100966, C,
A)(100985, A, G)(101021, T, C)(101150, T, C)(101228AG)(101286, G, A)(101296AG)(101297, G, A)(101433, C,
T)(101438, A, C)(101442, A, G)(101456, G, T)(101473, G, A)(101474, A, C)(101521, A, G)(101539, A,
T)(101547, C, T)(101582, G, A)(101596, A, C)(101623, A, G)(101652, G, T)(101674, A, G)(102256, C,
CT)(102269, G, T)(102348, C, T)(102349, A, G)(102409, GT, G)(102411, T, A)(102447, T, C)(102459, A,
C)(102460, A, C)(102495, T, C)(102542, C, T)(102547, T, C)(102557, C, T)(102584, T, C)(102599, G,
A)(102623, C, T)(102630, A, G)(102646, A, G)(102665, A, G)(102733, C, T)(102735, A, T)(102784, G,
A)(102800, A, G)(102866, A, G)(102981, T, C)(103120, A, G)(103153, G, A)(103173, A, G)(103218, G,
A)(103233, C, G)(103252, A, T)(103270, A, G)(103283, G, A)(103292, T, C)(103303, T, C)(103358, G,
A)(103369, A, G)(103380, A, C)(103419, C, T)(103527, T, C)(103550, T, C)(103564, A, G)(104575, A,
T)(104665, A, G)(104729, T, A)(105436, C, A)(105493, T, C)(105533, TCTTCAAGG, T)(105553, A, G)(105658,
T, C)(105672, C, G)(105722, A, G)(105767, G, A)(105776, G, A)(105781, A, G)(105827, G, C)(105849, G,
T)(105866, G, A)(105867, A, G)(106011, A, T)(106026, T, C)(106057, T, A)(106072, C, T)(106093, G,
A)(106109, G, A)(106135, G, A)(106234, C, T)(106286AG)(106356, T, C)(106363, C, T)(106374, T, C)(106375,
G, A)(106382, T, C)(106422, C, T)(106442, G, A)(106463, C, T)(106482AG)(106516, T, C)(106593, G,
A)(106595, T, C)(106597, G, T)(106635, G, A)(106724, G, A)(106732, C, A)(106778, G,
A)(106816AG)(106884AG)(106899, G, T)(106931, G, A)(106957AG)(107022, C, T)(107070, A, G)(107075, G,
A)(107154, C, T)(107178, C, G)(107282, G, A)(107364, A, G)(107376, G, A)(107377, G, A)(107499, G,
A)(107640, T, G)(107657, A, G)(107680, A, G)(107699, T, C)(107700, T, C)(107708, G, A)(107802, T,
C)(107844, C, A)(107901, A, G)(107933, C, CATCAAATGAAAAGAGGGAT)(107966, T, C)(108028, T, G)
(108074, G, A)(108214, T, A)(108273AG)(108337AG)(108384, T, C)(108393, T, G)(108448, C, T)(108455, C, T)
(108504, C, G)(108545, G, A)(108561, T, C)(108562, G, A)(108567, A, G)(108585, G, A)(108615, A,
G)(108823, C, A)(108837, C, T)(108853, G, A)(108958, C, T)(109001, A, G)(109027, G, A)(109110, G,
T)(109123, G, A)(109180, G, A)(109219, C, T)(109244, T, A)(109254, T, C)(109255, T, A)(109287, T,
C)(109336, A, G)(109339, G, A)(109341, T, C)(109342, C, T)(109347, G, A)(109379, T, C)(109397, A,
G)(109435, T, C)(109489, C, T)(109600, T, C)(109608, T, G)(109758, A, G)(109852, A, G)(109984, A,
G)(110059, A, C)(110098, G, C)(110162, G, T)(110261, G, A)(110319, T, C)(110410, G, A)(110421, C,
T)(110445, G, T)(110472, T, C)(110495, A, G)(110568, A, G)(110577, G, A)(110733, C, T)(110801, G, A)
(110869, T, C)(110885, G, A)(110899, T, G)(110905, A, G)(110928, T, C)(110970, G, C)(111048, C,
T)(111087, A, G)(111118, C, T)(111120, A, G)(111193, C, T)(111194, G, A)(111213, T, C)(111229, A,
G)(111336, A, G)(111401, G, A)(111422, T, A)(111440, A, G)(111442, C, T)(111443, A, G)(111452, G,
A)(111466, C, T)(111473, T, C)(111479, T, C)(111524, T, C)(111527, G, A)(111566, A, T)(111684, C,
T)(111709, C, T)(111762, T, C)(111783, T, G)(111837, C, A)(112013, G, A)(112064, T, C)(112101, C, T)(112200, C, T)(112255, G, A)(112332, G, C)(112334, T, C)(112336, G, A)(112377, G, A)
(112387, A, G)(112398, C, T)(112410, C, T)(112628, C, T)(112629, T, G)(112684, G, A)(112696, T,
C)(112701, T, A)(112764, G, A)(112817, G, A)(112862, A, G)(112870, C, T)(112885, C, CAA)(112891, T,
C)(112902, T, C)(112909, T, C)(112938, G, A)(112988, G, A)(113147, A, G)(113205, A, T)(113308, G,
A)(113316, G, A)(113328, G, A)(113338, G, A)(113362, G, A)(113378, T, C)(113406, G, A)(113416, A,
G)(113419, T, G)(113439, T, C)(113441, G, A)(113469, C, T)(113474, G, A)(113575, G, A)(113590, C,
T)(113599, A, C)(113677, T, G)(113688, C, T)(113722, T, C)(113735, G, T)(113758, T, C)(113766, A,
T)(113821, A, G)(113881, A, G)(113886, A, G)(114036, G, A)(114051, A, G)(114149, T, C)(114163, A,
G)(114196, C, T)(114301, T, C)(114323, T, C)(114333, C, T)(114419, T, A)(114426, A, G)(114478, T, C)
(114496, A, G)(114537, C, T)(114704, G, T)(114786, C, G)(114995, A, ATT)(115081, C, CA)(115108, C,
T)(115126, A, T)(115183, A, G)(115219, A, G)(115242, T, C)(115263, C, G)(115267, G, A)(115442, C,
G)(115463, A, G)(115536, A, G)(115838, C, T)(115887, A, T)(116117, C, CT)(116163, C, T)(116215, GA,
G)(116706, T, C)(116709, T, C)(116730, A, G)(116750, G, A)(116797, T, A)(116838, T, C)(116853, G,
T)(116859, A, C)(116867, A, G)(116936, A, G)(118986, A, G)(121079, C, A)(131247, GGA, G)(131757, T,
TTTCC)(134258, T, TGTCGGAGTCAAA)(134312, A, G)(134754, A, T)(134853, T, G)(134861, AAAT, A)(134916, T,
C)(134927, T, TTCA)(135073, T, TA)(135183, C, G)(135195, C, CAT)(135240, C, T)(135242, T, C)(135290, T,
A)(135292, C, T)(135293, A, G)(135321, A, G)(135397, A, T)(135486, G, T)(135534, T, G)(135542, T,
TA)(135786, T, C)(135817, TAGAAAATTCAACG, T)(135985, T, A)(136026, T, TAG)(136119, T, TA)(137056, A, G)
(137334, T, A)(137422, A, AT)(137512, CTT, C)(138102, CT, C)(138164, A, G)(138226, C, T)(138244, C,
T)(138350, T, C)(138399, C, A)(138406, A, G)(138430, G, A)(138514, T, C)(138669, C, T)(138785, A,
T)(138949, A, G)(138998, A, G)(138999, G, A)(139041, G, A)(139322, TAA, T)(139596, G, A)(139597, G,
T)(140248, A, T)(140543, CAT, C)(140965, G, A)(141005, A, G)(141038, C, T)(141082, T, G)(141086, C,
T)(141097, T, C)(141109, T, A)(141121, T, A)(141371, T, C)(141386, T, TA)(141577, G, A)(141763, C,
T)(141817, C, T)(141855, A, G)(142070, A, AT)(142102, A, AT)(142199, G, A)(142292, A, G)(143013, T,
C)(143443, TATAA, T)(143488, C, T)(143574, A, G)(144126, C, CT)(144777, C, T)(144784, TA, T)
(145635, T, G)(145705, G, A)(145743, C, T)(145844, A, T)(146096, C, G)(146745, T, C)(146797, C,
T)(147035, A, AAT)(147059, A, G)(147085, C, T)(147199, G, A)(147585, T, C)(147788, T, C)(147854, A,
G)(147914, G, A)(148086, CT, C)(148170, G, A)(148176, T, TA)(148184, T, C)(148363, G, A)(148364, A,
G)(148378, C, T)(148452, TCA, T)(149104, T, TA)(149180, TA, T)(150503, A, C)(152574, C, G)(154537, C,
CT)(154657, A, G)(155720, G, GCAA)(157051, A, T)(158650, T, C)(159822, G, C)(160452, G, A)(161496, CA,
C)(162302, T, G)(162671, G, A)(164209, A, G)(165093, T, C)(165095, T, C)(165097, T, C)(165099, T,
C)(165101, T, C)(165103, T, C)(165109, T, G)(165111, T, C)(165508, G, T)(166058, C, T)(166139, G,
GT)(166443, A, G)(166602, A, G)(167195, A, C)(167215, T, C)(168431, A, G)(170364, T, C)(170379, TA,
T)(170381, C, T)(174672, C, A)(179146, C, T)(179151, T, G)(179218, C, T)(179319, A, G)(179330, G, A)
(179487, C, T)(180125, T, C)(182883, A, G)(183429, A, T)(183465, A, G)(183589, G, GA)(186740, G,
A)(186773, A, G)(186785, T, C)(186846, T, C)(186857, G, A)(186890, A, G)(186896, A, G)(187073, C,
T)(187089, G, A)(188618, T, C)(189381, A, G)(189407, G, T)(189408, C, T)(189480, A, G)(189683, G,
T)(189695, G, A)(189738, C, T)(189741, C, T)(189751, A, T)(189755, A, G)(189816, T, C)(189941, T,
C)(189960, T, A)(190037, C, T)(191244, G, C)(191644, T, A)(192269, A, C)(197753, C, T)(198089, A,
G)(202586, A, T)(203004, AT, A)(203366, C, T)(205391, A, G)(205708, GA, G)(207051, T, C)(215203, T,
A)(215287, C, T)(215302, T, A)(215926, CA, C)(215988, T, C)(216092, A, G)(216379, G, A)(216408, T, C)
(216478, T, A)(216700, G, A)(217364, AT, A)(217465, C, T)(218019, G, T)(218020, C, T)(221170, T,
G)(221323, G, T)(223386, G, A)(223416, C, T)(223443, A, T)(223525, T, A)(223540, A, T)(223548, T,
A)(223998, G, A)(224708, A, G)(224847, C, T)(224864, C, T)(225538, T, C)(225715, A, T)(225724, C,
A)(225859, C, T)(225895, A, T)(225906, T, C)(225912, G, A)(225987, G, A)(226826, T, C)(227233, A,
T)(231246, C, A)(231403, A, AATTTTGAAT)(232469, C, T)(233625, T, C)(233629, C, A)(235201, A, G)(235345,
T, C)(235348, T, C)(235494, C, T)(235596, A, G)(235767, T, C)(235802, A, G)(235812, A, G)(236734, C,
T)(240232, C, A)(243279, A, AT)(243880, A, G)(244547, GGT, G)(244897, A, G)(246306, CT, C)(247485, T,
G)(249077, T, C)(250568, T, A)(250578, T, A)(250623, T, A)(252444, T, C)(257259, T, C)(257522, T, C)
(257649, G, A)(257982, T, C)(258162, A, G)(262017, C, A)(264325, C, T)(264559, C, A)(264643, C,
T)(265228, GT, G)(266300, G, A)(268131, C, T)(269209, G, A)(270223, T, C)(272201, A, C)(272244, G,
A)(278734, A, G)(278753, G, A)(278904, G, A)(278921, T, C)(279151, G, A)(279640, G, C)(279725, G,
T)(280166, C, T)(280445, A, G)(280510, T, C)(280612, T, C)(280740, G, A)(280757, T, C)(281045, G,
A)(281066, C, T)(282050, C, A)(282356, G, A)(283267, A, G)(283284, A, T)(283396, G, T)(283608, T,
TA)(284868, G, T)(286621, C, A)(286900, T, C)(287997, A, C)(288120, T, C)(288219, T, C)(288341, A,
AAACTT)(288718, AT, A)(289519, G, T)(292337, T, C)(294949, C, T)(295162, T, C)(296230, T, C)(296760, A,
C)(297862, G, C)(297998, C, T)(298125, T, C)(299108, A, G)(299122, G, T)(299541, T, C)(299767, A, G)
(299963, G, A)(307031, C, A)(308087, A, G)(309308, A, AGTT)(309425, G, A)(310868, G, A)(311395, A,
G)(311908, GC, G)(312317, A, C)(314425, CT, C)(314625, T, C)(315049, A, G)(315148, T, C)(316636, T,
A)(328660, T, C)(331287, G, A)(335548, A, G)(337652, T, A)(337656, A, C)(341802, C, T)(342876, A,
C)(344845, G, A)(348698, T, TA)(349015, A, G)(349026, AT, A)(352053, GA, G)(352125, C, T)(352379, T,
A)(353401, TG, T)(354094, A, C)(355286, C, T)(356485, T, A)(357931, G, C)(383916, T, C)(384121, A,
G)(384138, T, C)(384171, A, G)(385060, A, C)(385257, A, G)(385764, T, C)(387299, A, G)(387825, C,
T)(388045, C, T)(388798, G, A)(390410, A, G)(391380, AC, A)(392041, G, A)(402329, T, C)(403217, A,
G)(407763, A, G)(407764, A, G)(407770, G, A)(408262, G, A)(408263, C, T)(408969, C, T)(409114, G, A)
(409167, C, T)(409216, C, T)(409259, G, A)(409276, T, C)(410559, C, T)(410628, A, G)(410649, T,
C)(411312, G, A)(411663, C, T)(411921, C, A)(411954, T, C)(412696, A, G)(412702, G, A)(417511, G,
A)(418826, G, T)(419159, A, G)(420203, G, A)(420204, A, G)(420205, T, A)(420206, A, T)(420207, G,
A)(420210, T, G)(420867, G, A)(421329, T, C)(421402, C, T)(421413, G, A)(421799, G, GA)(422183, C,
A)(422193, T, G)(422231, A, G)(422245, G, C)(422247, T, C)(428657, T, C)(429971, T, C)(430070, T,
C)(430188, C, T)(430389, T, G)(430390, C, T)(431975, A, G)(432488, C, A)(432734, C, A)(434494, T,
C)(435674, T, 6)(435879, A, G)(436000, TTTTTTTCGGTTTTCGG, T)(436016, A, G)(436178, C, A)(436717, T, A)
(438833, T, G)(439116, G, A)(439622, G, A)(439652, C, T)(439661, A, AT)(439699, A, G)(441237, G,
A)(441245, C, G)(441248, C, CT)(441310, T, G)(441559, T, C)(441612, G, A)(441616, A, G)(441639, C,
T)(441643, T, C)(442758, T, C)(442773, T, C)(443065, C, T)(445731, T, G)(445762, C, T)(445803, A,
G)(446052, G, A)(446254, C, A)(446255, A, G)(446256, C, T)(447682, T, A)(448516, T, C)(448933, C,
T)(450115, G, A)(458275, TAA, T)(458675, T, G)(460567, T, C)(461123, A, G)(462712, C, T)(463238, G,
A)(463523, A, C)(463524, A, C)(464042, C, A)(464044, A, C)(464045, G, A)(464046, A, G)(464561, T,
C)(464685, C, A)(465191, C, T)(467341, A, C)(467967, A, G)(469175, A, G)(470177, T, A)(471061, A,
AG)(471576, T, C)(471999, T, C)(472339, C, T)(472391, A, G)(472995, G, A)(473154, C, T)(475419, G, A)
(475692, A, G)(475868, A, G)(476944, G, A)(477656, G, T)(478496, A, G)(479036, G, A)(480298, T,
A)(483746, G, C)(486067, A, AT)(490677, T, C)(491943, T, G)(492069, G, A)(497305, C, CT)(497312, G,
T)(497331, A, T)(497336, C, T)(497728, AGAG, A)(498001, G, A)(498091, T, C)(498217, G, T)(498530, C,
T)(498555, T, C)(498583, A, G)(498753, C, A)(500195, T, G)(500198, A, G)(500819, C, CATGCAT)(501087, A,
G)(503375, C, A)(507295, G, A)(507321, T, TATTA)(507521, T, C)(508421, AT, A)(511203, T, A)(511548, A,
C)(512091, T, C)(512757, T, C)(513699, T, A)(514311, C, T)(514654, A, C)(514848, T, C)(515125,
ATAGACACT, A)(515760, T, G)(516025, C, G)(517056, G, A)(517294, G, A)(517327, A, G)(520080, C,
G)(520632, G, A)(520662, T, C)(520816, A, G)(522393, TAATATAC, T)(522508, C, T)(523351, T, C)(525506, C,
T)(527320, A, G)(528274, C, A)(530889, ATGT, A)(531852, A, T)(531879, G, T)(531880, C, T)(532747, C, T)
(532810, C, A)(533079, C, G)(533308, A, T)(534115, C, T)(534622, GT, G)(534652, T, A)(534653, T,
A)(537224, G, A)(540528, C, T)(543943, C, A)(544268, G, A)(544410, A, T)(544566, C, T)(544666, A,
T)(544890, G, A)(546236, G, A)(549530, G, A)(550397, T, G)(550437, G, A)(550462, T, A)(550499, A,
G)(551998, T, C)(552095, G, GAT)(553290, G, A)(553527, T, C)(553614, G, A)(557391, T, C)(557400, G,
A)(560007, A, G)(562189, T, C)(562396, G, A)(562898, A, G)(564184, A, T)(565072, TA, T)(566032, ACATC,
A)(566194, T, A)(566655, T, C)(567395, T, TA)(567435, T, C)(567560, G, T)(568255, G, C)(568263, G,
A)(568312, A, C)(568457, G, A)(569237, T, A)(569755, G, A)(570168, T, TC)(570221, G, T)(570254, A,
G)(571700, A, G)(572799, A, G)(573989, G, A)(574297, T, C)(574598, G, A)(574841, G, A)(575499, T, C)
(576832, C, G)(577152, A, G)(578527, C, G)(578533, C, A)(579374, C, T)(581104, C, T)(581528, A,
AG)(585743, C, T)(586062, A, G)(586983, G, C)(587346, C, T)(592788, A, G)(594276, G, A)(595199, TA,
T)(597674, T, C)(598491, C, T)(599186, G, A)(599188, A, C)(599190, C, A)(599262, TA, T)(600012, C,
T)(600020, C, T)(600259, A, G)(600612, C, T)(600863, C, T)(603782, G, A)(603863, A, G)(603875, G,
T)(604072, A, T)(604209, C, A)(604249, G, A)(604793, C, A)(604796, C, T)(604798, A, T)(604807, G,
A)(604818, C, T)(604840, C, T)(604876, A, T)(604877, C, T)(606474, A, G)(606513, T, C)(606827, T,
A)(606831, G, A)(608147, T, C)(608609, G, A)(609329, C, T)(609560, C, A)(611306, G, T)(611537, T,
G)(611620, C, T)(611674, A, G)(617965, C, T)(619283, C, CA)(619627, A, G)(620257, T, C)(622096, T, G)
(622530, G, A)(623023, T, G)(624158, A, AT)(624751, G, A)(626275, T, C)(626925, G, A)(627236, A,
G)(628147, T, C)(629376, G, T)(634490, A, G)(634571, A, T)(634638, G, A)(634653, A, G)(634670, C,
T)(634677, A, G)(634895, T, C)(635190, GT, G)(635923, C, T)(635989, C, G)(635992, G, A)(636480, T,
A)(636549, T, C)(636833, G, A)(636837, A, G)(636863, T, G)(636868, G, A)(636976, G, A)(638241, G,
A)(638827, C, T)(641477, TCTC, T)(642023, A, G)(642362, A, C)(643641, C, T)(646008, C, T)(647660, G,
A)(648062, C, A)(651928, G, A)(652480, A, T)(653021, A, C)(654315, G, GAGT)(655973, A, G)(656536, G,
T)(656761, G, T)(656774, A, G)(656794, A, T)(656863, T, C)(656877, T, C)(657378, G, T)(657443, C,
T)(657446, G, A)(660001, G, A)(660350, T, C)(660619, A, G)(660694, T, A)(660697, G, A)(660701, C, T)
(660735, C, T)(661391, G, A)(662396, T, C)(664022, T, A)(665703, T, C)(665779, C, T)(666913, G,
C)(667032, G, A)(667799, C, A)(667902, G, A)(669749, A, G)(675510, A, T)(677142, CTTA, C)(677220, A,
C)(677408, G, A)(677409, A, C)(678202, G, GA)(678242, TTA, T)(678351, T, A)(678583, GT, G)(680309, T,
C)(681187, T, A)(681191, T, G)(681199, A, T)(681218, T, G)(681221, G, T)(681497, A, C)(681503, C,
A)(681577, C, A)(681629, C, T)(681665, G, C)(682861, T, C)(682974, A, G)(683039, A, G)(683153, T,
C)(683269, A, G)(683386, T, C)(683443, C, T)(683454, T, G)(684100, T, C)(684566, T, G)(684668, T,
C)(684686, T, C)(684807, A, G)(684862, C, G)(685088, A, G)(685663, G, A)(686108, A, G)(686210, T,
G)(686426, G, A)(687077, T, C)(687169, GC, G)(687551, T, C)(687573, T, G)(688676, C, T)(689333, G,
A)(690612, G, A)(690638, C, T)(691215, A, G)(693018, C, T)(693492, C, A)(693847, G, C)(694251, C,
T)(695216, T, G)(695506, G, A)(695656, G, A)(695797, A, G)(695890, G, A)(695970, C, T)(695999, A,
G)(696123, C, A)(696432, T, C)(696483, TGCA, T)(696615, ACCTCTATATACTAGGAACATCT, A)(699013, G,
A)(699111, A, G)(699240, A, G)(699562, T, C)(699850, A, G)(700089, A, G)(700286, T, C)(700729, C,
T)(701417, A, G)(701937, A, G)(702001, A, G)(703406, G, A)(705156, T, C)(708446, T, G)(708973, A,
AT)(709646, T, A)(709647, T, A)(715267, T, C)(717794, A, G)(718360, T, C)(720092, G, T)(720141, T,
G)(720156, T, A)(721355, T, TAC)(724354, A, G)(726159, A, G)(726702, C, T)(729740, G, A)(730697, C, T)
(730779, T, G)(730794, T, C)(731831, A, G)(731861, G, T)(731964, C, T)(732032, A, G)(732285, C,
A)(732290, G, A)(736745, G, A)(737324, AT, A)(739870, C, G)(740413, A, G)(743823, G, GACACA)(744449, G,
A)(745394, A, C)(747825, C, G)(748819, A, G)(753919, TA, T)(753964, G, C)(754481, A, AAGCT)(756253, G,
A)(756784, C, T)(757088, C, T)(75103, A, ATATATATATATATATATG)(760888, A, ATTTTGAAT)(760958, A,
6)(761035, C, T)(761093, T, C)(761649, T, C)(761723, G, A)(761912, A, G)(761913, A, C)(762153, G,
A)(763507, G, T)(764204, TCA, T)(764594, TA, T)(765933, A, G)(767598, G, A)(768098, G, C)(769049, G,
T)(769983, G, A)(770234, C, A)(771355, A, C)(771527, T, TCACCCTC)(771743, G, A)(772836, T, C)(773053, T,
A)(773065, A, C)(773097, ATAAACTCC, A)(775927, A, G)(777182, C, T)(780060, CTATA, C)(780736, CTATA,
C)(781980, T, A)(782008, G, C)(782096, A, G)(782115, C, T)(782267, C, A)(782732, C, T)(783631, G,
T)(783871, C, A)(784951, A, G)(784987, A, G)(785005, C, G)(785359, T, A)(785973, C, T)(786428, C, T)
(786572, A, G)(787558, T, C)(787638, G, C)(788230, T, A)(788572, T, G)(788642, C, T)(789517, A,
G)(789554, GA, G)(789627, T, C)(789778, G, A)(789913, T, C)(790072, T, C)(791039, T, C)(791089, T,
C)(791187, G, A)(791280, C, T)(791484, G, A)(791535, A, G)(791791, C, T)(792081, G, A)(792423, G,
A)(793508, A, T)(793586, T, C)(793593, C, G)(793808, C, T)(793993, A, G)(794096, A, G)(794326, A,
G)(795817, C, T)(796182, T, C)(796356, T, G)(796504, G, A)(797041, G, A)(797102, C, T)(797117, G,
A)(797229, C, T)(797246, T, C)(797821, T, C)(798183, C, T)(799452, T, C)(799512, T, C)(799591, A,
G)(800457, C, G)(800734, T, C)(800749, A, C)(800798, A, G)(801045, G, A)(801053, T, C)(801153, T,
G)(801245, A, C)(801431, T, C)(801444, T, C)(801572, C, T)(801936, A, G)(802236, G, A)(802470, C, T)
(802591, A, G)(802639, C, A)(803256, G, T)(805375, A, G)(805755, G, A)(805794, C, A)(806052, T,
C)(806123, C, G)(806778, C, T)(807493, G, A)(807966, T, C)(808458, A, G)(808532, T, G)(809124, T,
C)(809420, CA, C)(810156, G, A)(810512, T, TTTTGTGA)(810598, C, T)(810743, C, T)(812172, C, T)(813368,
T, A)(814098, A, G)(815627, C, CA)(815803, A, G)(820090, G, A)(820114, A, G)(820489, T, C)(821162, A,
G)(821194, A, C)(822328, AAATT, A)(822458, G, T)(823332, T, C)(823338, A, G)(823388, CT, C)(823399, G,
A)(823636, C, T)(823662, C, G)(823860, G, T)(823958, T, C)(824136, A, ATGT)(824391, C, T)(825841, A,
C)(825910, G, A)(826037, T, G)(826354, G, A)(826634, A, G)(826654, C, T)(826760, G, C)(827013, G,
A)(828096, C, T)(828130, T, C)(828593, C, A)(828741, G, C)(828802, G, A)(828890, T, C)(828909, C, T)
(829769, C, T)(830000, C, A)(830201, T, C)(830328, A, G)(830401, TAG, T)(830441, C, T)(830458, C,
T)(830466, G, A)(830547, C, T)(830953, G, A)(831147, TG, T)(831396, C, T)(831522, G, A)(831627, C,
G)(831645, A, G)(832064, A, G)(832208, A, G)(835195, A, G)(835580, C, T)(835891, C, G)(836339, A,
G)(836453, G, C)(836675, C, T)(836734, GC, G)(836885, A, C)(836952, G, T)(837130, A, G)(837280, G,
A)(837631, A, G)(837798, T, A)(837852, T, C)(838296, A, G)(838455, T, G)(838674, T, C)(839491, A,
G)(839614, G, A)(839644, T, C)(840322, A, G)(840432, C, T)(840442, A, G)(840457, C, T)(840967, T,
G)(841150, C, T)(841322, A, G)(841447, CA, C)(841492, A, G)(841550, A, G)(841708, C, T)(841710, C,
G)(841774, C, T)(841850, C, T)(841860, T, G)(842888, CACTTAA, C)(843144, C, T)(843462, A, G)(843489, T,
A)(843566, T, G)(843602, G, A)(843830, C, T)(843913, A, G)(843977, G, A)(844111, T, C)(844187, G,
A)(844188, A, G)(844228, A, AAT)(844521, G, C)(844834, C, T)(844844, A, G)(844848, C, T)(845028, C,
T)(845044, C, T)(845264, C, G)(845348, G, A)(845594, A, G)(845686, A, G)(845732, G, A)(845794, C,
T)(845816, C, T)(845835, G, A)(845865, ACTGGGGGT, A)(845947, C, T)(846041, A, G)(846060, G, C)(846087,
A, G)(846150, A, G)(846171, C, G)(846276, G, C)(846610, A, T)(848260, G, A)(848273, G, T)(848301, C,
A)(848315, A, G)(848323, C, T)(848595, G, A)(848598, G, A)(848682, C, T)(848685, G, A)(848689, A,
C)(848801, G, T)(849064, A, G)(849071, C, A)(849228, A, G)(849253, T, C)(849314, T, C)(849669, T,
C)(849707, G, T)(849926, C, T)(849952, T, A)(850031, T, C)(850083, A, G)(850849, G, A)(852352, C, T)
(852367, A, G)(852380, T, C)(852389, T, G)(852397, A, G)(852420, T, G)(852421, C, T)(852476, T,
C)(852629, T, A)(852654, G, A)(852673, C, T)(853485, T, C)(853512, C, T)(853872, G, A)(854172, A,
G)(854446, T, C)(854739, T, C)(855225, C, A)(855624, C, T)(855773, G, A)(855783, T, C)(855836, A,
G)(857541, T, C)(857743, A, G)(857774, A, C)(858014, G, A)(858189, C, T)(858283, C, T)(858379, C,
G)(858450, A, C)(858697, G, A)(858801, T, C)(858817, C, T)(858909, GC, G)(859059, T, C)(859122, G,
T)(859477, C, T)(859532, A, G)(859533, G, A)(859784, A, G)(859829, C, T)(859830, A, G)(859840, C,
T)(860116, T, C)(860241, T, A)(860485, ATGTGAACCC, A)(860751, A, G)(860754, G, A)(860893, C, T)
(861002, T, C)(861150, T, C)(861320, 1111GC, T)(861381, A, G)(861522, G, A)(861662, G, A)(862050, A,
AC)(862067, A, T)(862180, T, C)(862242, G, A)(862390, C, T)(863750, C, T)(864169, G, T)(864234, C,
T)(864536, A, G)(864669, G, A)(867557, G, A)(870206, A, AGAAAC)(870211, C, T)(870297, G, C)(870896, A,
G)(871029, G, A)(871190, T, TCA)(871423, G, T)(871550, C, A)(871602, C, T)(872239, C, G)(872563, C,
T)(872782, C, T)(872814, C, T)(872932, C, T)(872967, C, G)(873095, C, T)(873762, C, T)(873882, A,
G)(873906, C, T)(874001, A, G)(874014, T, C)(874501, C, G)(874576, A, C)(874606, C, T)(874832, T,
C)(874899, T, C)(874997, A, G)(875057, T, C)(875206, G, A)(876250, G, GT)(876326, T, C)(876482, G,
T)(876660, T, G)(877031, T, G)(877203, C, T)(877360, T, C)(877370, G, A)(877450, T, G)(877463, T, C)
(877648, C, T)(877801, CTCA, C)(878121, T, G)(878572, G, T)(878644, T, A)(878657, T, G)(881483, C,
T)(881500, T, C)(881510, A, T)(881668, C, T)(881731, A, C)(881953, C, T)(882389, C, T)(882434, T,
C)(882466, C, T)(882511, G, A)(882564, T, A)(882609, G, A)(882947, C, T)(882960, A, G)(883085, G,
T)(883131, G, T)(883268, A, C)(883676, G, A)(883793, C, T)(883837, A, G)(883905, A, G)(884169, A,
T)(884675, A, T)(884750, C, A)(884789, C, T)(884886, A, G)(884949, G, C)(884950, T, C)(885465, C,
T)(885488, A, G)(885651, A, G)(885663, A, G)(885798, G, A)(885799, C, T)(885852, A, C)(885854, G,
A)(885902, T, C)(885987, A, G)(886058, A, G)(886060, A, T)(886104, C, T)(889518, C, A)(889657, T,
C)(889736, T, C)(889803, A, G)(890021, G, A)(890375, T, C)(890376, C, A)(890401, T, C)(890469, T, A)
(890478, C, T)(890490, A, C)(890509, C, T)(890533, A, T)(890538, G, T)(891721, A, T)(891779, C,
T)(894450, C, T)(894563, T, C)(894681, G, T)(894920, C, T)(895041, A, C)(895078, T, C)(895110, T,
C)(895650, T, G)(895932, A, G)(896162, T, C)(896163, A, G)(896248, C, T)(896283, C, T)(896404, G,
A)(896429, T, C)(896578, C, T)(896610, G, A)(896624, A, G)(896712, A, G)(896920, T, C)(896991, G,
A)(897000, C, T)(897156, C, T)(897286, C, G)(897312, T, C)(897530, G, A)(897554, A, G)(897571, C,
T)(897645, T, G)(897736, G, A)(897737, T, C)(897874, A, G)(897991, A, G)(898558, TGTTTG, T)(898872, T,
C)(898904, A, G)(898981, T, C)(898992, C, T)(899074, T, C)(899700, C, T)(900404, A, G)(900448, A,
G)(900478, C, T)(900948, T, C)(901146, T, C)(902753, A, AT)(903000, T, C)(903001, G, C)(903137, G,
A)(903150, A, G)(903154, G, A)(903686, G, A)(904041, C, T)(904082, T, A)(904732, TA, T)(905205, T,
C)(905217, G, C)(905241, G, A)(905259, A, G)(905290, A, G)(905377, C, T)(905569, T, C)(905659, T,
C)(905782, C, T)(905836, T, C)(905867, A, G)(905987, A, G)(906207, T, G)(906215, C, T)(906255, A,
G)(906297, T, C)(906373, G, A)(906493, T, C)(907114, T, C)(907115, T, C)(907116, G, A)(907150, C,
G)(907197, G, A)(907207, G, A)(907274, T, C)(907276, A, G)(907416, C, A)(907826, A, C)(908281, G,
A)(908291, T, C)(908445, G, A)(908798, C, T)(908799, A, G)(908863, G, A)(908874, A, T)(908894, G, T)
(908925, G, A)(908975, G, A)(909078, G, A)(909084, G, A)(909100, C, A)(909767, T, C)(909781, G,
A)(909808, A, G)(909822, C, T)(909883, A, G)(909971, G, A)(910145, C, A)(910146, A, G)(910148, C,
T)(910349, C, T)(910363, T, C)(910582, A, G)(910609, T, C)(910615, C, T)(910641, T, C)(910732, G,
A)(910753, G, A)(911113, A, G)(911159, G, C)(911405, A, G)(911428, A, G)(911605, A, G)(911772, TC,
T)(911857, T, C)(911980, A, G)(912389, T, C)(912430, A, T)(912478, C, A)(913061, A, G)(913863, A,
T)(914097, A, G)(914145, T, TG)(915768, G, A)(916524, A, G)(916606, C, T)(917170, T, C)(917946, TCAGGC,
T)(918019, G, A)(918060, A, G)(918123, G, A)(918648, A, G)(918685, G, A)(918720, A, T)(918886, A,
G)(918913, A, G)(918954, G, T)(918957, T, A)(919563, C, T)(919573, C, T)(919601, G, A)(919630, G, A)
(920332, A, G)(920333, A, G)(921511, C, CT)(923125, C, T)(933521, A, T)(933575, G, A)(933588, T,
C)(933611, A, G)(933656, G, T)(933660, A, G)(933705, T, G)(933747, A, G)(933788, C, A)(933829, T,
C)(933902, G, A)(933920, T, A)(933991, T, TTATA)(934108, A, AAT)(934946, GACTTAATTTTT, G)(935063, T,
C)(935080, C, T)(935130, A, G)(935141, A, T)(935182, G, T)(935227, A, AT)(935261, T, C)(935294, G,
A)(935323, T, C)(935462, A, G)(935563, G, C)(935631, A, G)(935955, G, A)(936006, A, G)(936021, T,
C)(936286, T, C)(936288, G, A)(936373, A, T)(938558, C, T)(939047, A, C)(939128, T, A)(939254, C,
T)(939308, G, A)(939335, A, G)(939355, C, T)(939408, C, T)(939553, A, G)(939573, G, A)(939631, G,
A)(939933, A, G)(939998, A, G)(940016, T, C)(940081, A, G)(940134, C, T)(940539, T, C)(940898, A, T)
(940925, AG, A)(940969, G, A)(941141, T, C)(941155, G, A)(941422, G, C)(941423, G, A)(942236, A,
G)(942478, G, T)(942885, T, C)(942922, C, T)(943319, ACCGTGCCG, A)(943349, A, G)(943360, A, G)(943434,
G, A)(943509, T, C)(943514, AT, A)(943697, T, C)(943903, C, T)(943975, G, A)(944487, TA, T)(944590, C,
A)(944644, G, A)(944647, G, T)(944792, A, G)(945158, A, T)(945208, T, C)(945474, C, A)(945509, C,
T)(945637, A, G)(945736, T, C)(945787, G, A)(945905, T, G)(946094, A, C)(946218, G, C)(946486, T,
G)(946643, A, T)(946717, G, A)(946943, G, C)(947471, A, C)(948065, T, C)(948105, A, T)(948580, G,
T)(948913, T, G)(950801, G, C)(951307, C, CA)(951400, T, TTTCAAAGATGATTC)(951512, A, G)(951585, C,
T)(951592, C, G)(951637, A, G)(951716, G, A)(951819, C, T)(954454, A, G)(954569, G, T)(954771, T, C)
(956298, G, A)(956525, G, A)(956555, A, G)(956570, C, T)(957261, A, G)(957421, A, G)(957668, G,
T)(957860, T, G)(957864, T, C)(957930, A, T)(958112, G, A)(958121, G, A)(958153, T, G)(958222, A,
G)(958250, C, T)(958606, G, A)(958642, A, G)(958721, AAAGGGT, A)(958750, A, G)(958770, C, T)(958788, T,
TG)(959045, C, T)(959155, G, C)(959380, G, C)(959413, TA, T)(959468, A, G)(959516, C, G)(959517, T,
C)(959586, A, G)(959634, G, A)(959773, C, T)(959913, C, T)(959958, A, T)(959975, C, CATTAAT)(960065, GA,
G)(960625, T, A)(960720, T, TTATA)(961298, T, C)(964319, T, C)(964369, G, A)(964375, A, G)(964531, T,
C)(964553, TTA, T)(964586, C, T)(964884, C, T)(964924, G, C)(964982, C, T)(965066, C, T)(965099, C,
T)(965124, A, T)(965257, ATT, A)(967282, A, G)(967330, G, A)(967365, G, C)(967574, A, C)(968333, G,
A)(968896, T, A)(969001, A, ATAATGAACTGTTACATTGT)(969292, T, A)(969474, A, T)(969533, C, T)
(970071, T, C)(970118, A, G)(970269, TA, T)(970297, C, T)(970406, C, G)(970532, CTTA, C)(971121, A,
AT)(971223, A, C)(971227, T, TAATGAGGA)(971429, G, GTAGC)(971622, C, T)(971710, G, A)(972142, CA,
C)(972218, C, T)(972371, C, CCT)(972499, T, C)(972655, G, A)(972879, C, T)(972956, A, G)(973034, T,
C)(973038, T, G)(973040, C, T)(973231, C, T)(973483, C, T)(973488, A, G)(973634, T, A)(973658, TA,
T)(973667, T, C)(973736, A, G)(973764, A, G)(973780, T, C)(973813, T, C)(973814, C, T)(973830, A,
G)(973867, T, C)(973886, T, A)(973943, A, C)(973980, CA, C)(974071, T, C)(974277, T, C)(974570, A,
AT)(974585, G, T)(974633, T, C)(974697, A, C)(974785, A, G)(974791, T, C)(974823, T, G)(974870, A,
G)(974879, G, T)(974921, A, G)(974993, G, A)(975002, T, C)(975003, G, A)(975005, T, C)(975010, T, C)
(975022, G, C)(975383, T, A)(975472, C, A)(975496, A, G)(975534, C, T)(975621, G, T)(976911, C,
A)(976972, C, G)(977014, G, T)(977339, G, T)(977434, G, A)(977652, T, G)(977774, A, G)(977790, G,
T)(977834, G, A)(977965, A, C)(977981, T, A)(978140, A, G)(978150, T, A)(978239, A, C)(978380, A,
G)(978403, G, T)(978411, A, C)(978471, ATCT, A)(978603, A, G)(978610, T, C)(978639, A, G)(978666, C,
T)(978787, A, T)(978855, A, G)(979011, A, G)(979118, G, A)(979194, A, C)(979256, ATC, A)(979293, T,
C)(979505, T, G)(979526, A, C)(979670, C, A)(979684, G, A)(979701, T, C)(979911, C, G)(980120, C,
T)(981090, A, T)(981355, CT, C)(981441, GA, G)(982713, T, C)(982806, G, A)(982836, T, C)(984412, T,
C)(984576, A, G)(984594, G, A)(984611, A, G)(984786, A, G)(986206, G, A)(986374, A, T)(986426, G, A)
(986601, C, T)(986706, A, G)(986840, C, T)(986954, G, A)(986965, T, A)(987005, C, T)(987127, C,
T)(987147, G, T)(987194, G, A)(987324, G, T)(987566, C, T)(988262, T, TTA)(988394, C, T)(988396, T,
C)(988449, A, G)(988611, GT, G)(988627, A, T)(988656, C, T)(988684, A, G)(988709, G, A)(988725, G,
A)(988747, C, T)(988748, T, C)(988798, A, G)(988800, A, G)(988822, C, T)(988849, G, C)(988851, T,
G)(988927, T, C)(990357, A, G)(990568, A, T)(993994, A, G)(994146, G, T)(994318, A, T)(994456, G,
T)(994610, A, G)(994764, C, G)(995188, T, TG)(995222, A, T)(995539, C, T)(995564, G, A)(995626, G,
A)(995721, T, C)(995820, T, C)(995825, C, T)(995844, A, G)(995874, T, C)(995889, G, A)(996205, G, )
(997703, A, T)(997943, C, T)(997987, C, T)(998023, A, G)(998114, C, A)(998726, G, A)(998751, G,
AA)(996432, G, A)(996736, A, G)(996756, G, A)(996786, C, T)(996856, C, T)(996893, C, T)(996918, T,
C)(997491, A, G)(998833, C, T)(998850, T, C)(998969, T, C)(999027, C, T)(999248, C, T)(999297, C,
T)(999531, G, GCTAAGT)(999595, A, G)(1000104, G, T)(1000220, G, A)(1000434, T, C)(1000522, A,
T)(1000835, G, C)(1001412, A, AC)(1001653, T, C)(1001718, A, G)(1001754, G, A)(1001836, T, C)(1002017,
G, A)(1002050, T, C)(1002203, C, T)(1002625, G, A)(1002692, G, A)(1002733, T, C)(1002735, C, T)(1002785,
G, A)(1002814, T, C)(1002945, T, C)(1003002, T, G)(1003082, C, A)(1003159, C, A)(1003527, A, C)(1003537,
A, G)(1003855, C, T)(1003939, G, T)(1005025, T, C)(1005138, A, G)(1005168, T, A)(1005275, T, A)(1005883,
T, C)(1006747, A, G)(1007212, G, T)(1007610, C, T)(1007784, G, C)(1007940, A, G)(1009740, A, C)
(1009938, C, T)(1010082, CTTAA, C)(1010288, T, C)(1010404, C, T)(1010589, G, A)(1010927, T, C)(1010958,
T, G)(1011013, C, A)(1011018, A, C)(1011048, C, T)(1011077, C, T)(1011081, A, G)(1011172, T, C)(1011174,
A, T)(1011205, A, G)(1011244, G, A)(1011262, A, G)(1011325, A, G)(1011413, G, A)(1011438, T, C)(1011451,
T, C)(1011566, C, G)(1011619, T, C)(1011637, T, C)(1011885, A, G)(1011904, C, T)(1011915, T, G)(1011960,
G, A)(1012001, A, C)(1012114, G, A)(1012239, T, A)(1012514, G, C)(1012557, C, T)(1012667, G, C)(1012738,
G, A)(1012953, T, A)(1013241, G, A)(1013781, C, A)(1013830, C, T)(1015933, G, A)(1016218, G, A)(1016593,
A, G)(1016620, G, T)(1016719, G, T)(1016741, G, A)(1017274, G, A)(1017281, A, G)(1017636, G, A)(1017777,
T, A)(1017813, C, T)(1017847, T, C)(1017864, G, A)(1017946, G, A)(1018034, G, A)(1018049, C, T)(1018134,
G, A)(1018163, G, A)(1018172, G, A)(1018233, G, A)(1018234, C, T)(1018258, C, T)(1018436, A, G)(1018566,
CAA, C)(1018613, C, T)(1018855, A, G)(1019464, A, T)(1019652, T, C)(1019658, A, G)(1019677, G,
A)(1019711, A, G)(1019718, G, A)(1019899, T, C)(1019915, G, A)(1019920, C, T)(1019969, A, G)(1020006, C,
T)(1020117, G, C)(1020269, C, T)(1020455, A, G)(1020486, G, T)(1020493, C, T)(1020506, G, A)(1020517, T,
C)(1020574, A, T)(1020658, T, C)(1020689, G, A)(1020749, G, A)(1020776, G, A)(1020897, C, T)(1020908, T,
C)(1020961, T, C)(1020992, C, T)(1021000, A, G)(1021071, T, C)(1021082, T, C)(1021101, G, A)(1021203, C,
T)(1021215, G, A)(1021246, G, C)(1021276, G, A)(1021277, G, A)(1021349, C, T)(1021365, A, T)(1021404, A,
G)(1021478, C, T)(1021498, C, T)(1021599, T, C)(1021638, C, T)(1021745, T, G)(1021898, C, T)(1022101, T,
C)(1022268, T, C)(1022312, G, T)(1022330, A, C)(1022355, C, T)(1022362, T, A)(1022445, A, G)(1022475, A,
G)(1022607, C, T)(1022652, T, C)(1022722, T, C)(1022759, T, C)(1022798, T, C)(1023043, C, G)(1023118, G,
A)(1023241, TGA, T)(1023302, G, A)(1023330, A, G)(1023373, C, T)(1023402, T, C)(1023407, C, T)(1023420,
G, A)(1023447, T, C)(1023451, A, C)(1023544, T, C)(1023547, T, C)(1023605, A, G)(1023610, T, C)(1023714,
G, A)(1023725, G, A)(1023755, T, C)(1023781, T, A)(1023804, G, A)(1023886, A, G)(1024117, T, C)(1024642,
C, T)(1024644, A, G)(1024659, C, T)(1024660, A, G)(1024765, T, G)(1024873, T, G)(1024878, C, A)(1024892,
T, C)(1025106, T, C)(1025148, A, G)(1025390, T, C)(1025394, C, T)(1025397, C, A)(1025402, A, G)(1025428,
G, T)(1025440, T, C)(1025448, A, T)(1025449, G, A)(1025555, G, A)(1025879, A, G)(1025902, C, T)(1026157,
A, G)(1026399, C, T)(1034813, C, T)(1034916, T, C)(1034944, A, G)(1034964, A, G)(1035038, T, C)(1035112,
C, T)(1035168, T, C)(1035190, T, TTCCTTCCGGACAACC)(1035331, G, T)(1035428, A, C)(1035496, A, G)(1035754,
A, C)(1035768, G, A)(1036011, C, T)(1036097, C, T)(1036175, G, A)(1036214, G, A)(1036455, C, T)(1037201,
T, C)(1037219, A, G)(1037270, C, A)(1037292, T, C)(1038026, G, A)(1039135, C, A)(1039234, C, A)(1039317,
G, A)(1039324, C, T)(1039332, G, T)(1039658, G, T)(1039711, T, C)(1039834, 1, C)(1039941, 1, C)(1040163,
G, A)(1040743, T, C)(1040929, C, A)(1040948, C, I)(1041100, CTGATTTTGAATTCAAATATATGTATTT, C)(1041244, A,
C)(1041298, G, A)(1041485, T, C)(1041488, T, C)(1041546, C, T)(1041570, T, C)(1041606, T, A)(1041607, T,
A)(1041809, A, T)(1041877, C, G)(1041974, C, T)(1042022, C, CT)(1042061, A, C)(1042085, A, G)(1042176,
A, G)(1042436, T, G)(1042487, G, A)(1042538, T, A)(1042914, T, A)(1042919, T, C)(1042921, T, C)
(1043072, G, T)(1043205, A, C)(1043257, A, G)(1043265, C, G)(1043343, G, T)(1043426, G, C)(1043494, G,
A)(1043959, G, A)(1043975, G, C)(1043992, C, A)(1056764, G, A)(1056788, A, T)(1059187, A, G)(1059209, T,
C)(1059268, A, T)(1059276, C, T)(1059286, T, A)(1059292, C, G)(1062756, A, G)(1069796, A, G)(1070119, T,
A)(1070125, A, T)(1070137, C, A)(1070236, T, C)(1070259, C, G)(1070261, C, T)(1070973, G, C)(1071247, T,
C)(1071325, T, A)(1071333, A, G)(1071358, G, T)(1071794, G, A)(1078248, T, C)(1078370, G, A)(1079223, T,
G)(1079684, C, T)(1079685, AT, A)(1080131, T, C)(1080134, C, T)(1081139, A, G)(1081307, T, C)(1081443,
A, G)(1081474, G, T)(1083641, G, A)(1083671, C, T)(1083786, C, T)(1084615, G, A)(1085006, C, T)(1085007,
A, C)(1085026, A, G)(1086770, A, G)(1088353, C, T)(1088857, C, T)(1088870, C, T)(1088898, G, A)(1089876,
C, T)(1090042, G, C)(1090110, A, G)(1090432, C, T)(1090444, T, A)(1090446, C, T)(1097741, C, T)(1097966,
G, A)(1098286, A, G)(1098505, A, G)(1102464, A, G)(1107369, T, A)(1123959, C, T)(1123980, A, G)(1123997,
G, A)(1124017, G, A)(1124043, T, C)(1127934, G, T)(1128414, C, A)(1128528, C, T)(1128631, T, C)(1129084,
G, A)(1129111, G, C)(1129830, C, T)(1130021, TAAA, T)(1130142, G, A)(1130364, C, T)(1130430, T, C)
(1130477, T, C)(1131258, A, G)(1131460, G, A)(1131461, A, T)(1131577, C, T)(1132026, A, C)(1132437, G,
T)(1132483, A, G)(1132659, C, T)(1132672, C, T)(1133489, C, T)(1133609, C, T)(1133612, C, T)(1133618, G,
A)(1134076, G, A)(1134147, G, A)(1134541, C, T)(1134594, C, T)(1135139, C, A)(1135490, C, G)(1135548, C,
T)(1137854, A, G)(1137869, C, T)(1137881, C, T)(1137899, A, G)(1138048, C, A)(1138065, A, C)(1138154, C,
T)(1138381, T, A)(1138412, TA, T)(1138424, T, A)(1139835, T, A)(1139863, T, A)(1155623, C, T)(1155643,
G, A)(1155656, A, C)(1155694, A, G)(1155713, A, G)(1156347, GAAGTTGATATTTATAA, G)(1157083, G,
T)(1158387, A, G)(1158428, C, G)(1158433, C, G)(1158696, G, A)(1159453, A, T)(1160237, A, T)(1160374, T,
C)(1160411, A, T)(1160412, C, A)(1164362, C, T)(1164393, A, T)(1164399, T, A)(1164432, T, C)(1164850, A,
C)(1164926, G, A)(1167359, A, G)(1167526, G, A)(1167547, T, A)(1167560, T, TAAAA)(1167747, T,
A)(1170791, A, G)(1172091, G, T)(1172946, A, G)(1173317, G, A)(1175737, A, T)(1175738, A, G)(1175742, C,
T)(1175782, A, G)(1177883, T, C)(1177885, C, A)(1177889, T, C)(1185598, A, G)(1185713, A, T)(1185789, A,
C)(1185855, A, G)(1185888, C, T)(1186004, T, G)(1186040, C, T)(1186056, G, A)(1186150, G, A)(1186310, C,
T)(1186368, A, G)(1186389, A, T)(1186417, T, C)(1186457, G, A)(1186754, C, T)(1187237, G, A)(1187480, A,
T)(1188486, C, T)(1190735, G, A)(1190774, A, T)(1190776, A, G)(1190900, A, G)(1190907, G, A)(1192043, T,
C)(1192055, A, G)(1192094, G, A)(1192097, T, A)(1195036, T, G)(1195044, A, G)(1195332, C, T)
(1195571, C, T)(1195792, C, A)(1195799, T, C)(1197319, G, A)(1198216, G, A)(1199662, T, G)(1201534, G,
GA)(1204277, A, G)(1204348, G, A)(1204578, A, G)(1204587, G, A)(1204869, C, A)(1205098, T, C)(1205136,
A, G)(1205144, A, G)(1205149, C, A)(1205156, A, G)(1205324, G, A)(1206002, A, T)(1206003, T, A)(1206072,
A, G)(1206153, ATTCAGTCATAGCATGTT, A)(1206229, T, A)(1206491, T, C)(1206786, A, T)(1206787, T,
A)(1208449, G, A)(1208483, G, GT)(1208610, G, A)(1210091, T, A)(1211028, A, G)(1211041, G, T)(1211455,
C, A)(1211469, A, G)(1211662, C, CAG)(1211835, G, A)(1211904, A, G)(1212427, T, C)(1212448, TAAAA,
T)(1212491, C, A)(1212559, A, G)(1212717, C, T)(1212930, A, G)(1213231, C, T)(1213284, T, C)(1213360, A,
ATAAG)(1213408, T, C)(1213445, G, A)(1213847, T, C)(1214335, A, G)(1215100, C, T)(1215340, TA,
T)(1220730, C, A)(1222465, A, C)(1222566, T, A)(1222901, G, C)(1223092, T, A)(1223418, T, C)(1223448, G,
A)(1224132, C, T)(1224899, G, T)(1224901, T, G)(1225210, T, C)(1225715, A, C)(1225726, GTACA,
G)(1225843, A, T)(1225934, G, T)(1225939, GA, G)(1226144, C, T)(1226454, A, AT)(1226474, A, G)
(1226485, TA, T)(1226746, A, G)(1226762, A, T)(1227057, C, T)(1227097, A, G)(1227105, G, A)(1227114, T,
C)(1227167, C, T)(1227173, A, G)(1227238, A, G)(1227333, C, T)(1227415, T, C)(1227416, A, C)(1227449, G,
T)(1227457, G, A)(1227474, G, A)(1227638, T, C)(1227658, T, C)(1227695, A, G)(1227696, T, A)(1227702, A,
G)(1227802, T, TA)(1227917, A, G)(1227986, T, C)(1228045, C, G)(1228105, A, T)(1228261, G,
GTAACAT)(1228401, C, T)(1228564, C, T)(1228668, A, G)(1229096, C, A)(1229180, G, A)(1229325, A,
G)(1229766, C, T)(1229785, GA, G)(1229877, A, G)(1231518, C, A)(1232093, A, T)(1233647, C, G)(1233708,
A, G)(1234121, G, GAA)(1234175, G, A)(1234207, A, T)(1234249, G, A)(1234259, C, T)(1234696, G,
C)(1234698, T, A)(1234743, G, C)(1234773, A, C)(1234965, C, T)(1235004, T, C)(1235049, T, TA)(1235305,
C, G)(1235580, T, A)(1235849, T, C)(1235871, T, A)(1236026, G, A)(1236211, C, T)(1237449, G, C)(1237567,
T, A)(1237568, G, T)(1237764, T, C)(1237842, C, T)(1238035, A, G)(1238193, A, G)(1238226, A, C)(1238243,
A, G)(1238322, A, G)(1238421, T, C)(1239297, G, T)(1240510, G, T)(1240547, A, G)(1240799, T, A)
(1241143, T, C)(1241411, A, T)(1241494, A, AT)(1242030, GGAGAAA, G)(1242786, C, A)(1242833, T,
A)(1242897, G, A)(1242955, T, A)(1243181, A, T)(1243452, T, C)(1244587, A, T)(1244597, G, T)(1244630, T,
G)(1244745, G, A)(1245120, AT, A)(1245174, G, T)(1245183, A, G)(1245284, C, T)(1245306, A, G)(1245312,
A, T)(1245313, T, A)(1245314, C, T)(1245337, T, G)(1245341, C, T)(1248314, C, T)(1248347, G, A)(1248365,
C, T)(1248374, A, C)(1248393, A, G)(1248401, T, C)(1248454, G, A)(1248472, G, A)(1248496, C, T)(1248508,
G, A)(1248532, G, A)(1248563, T, C)(1248644, T, C)(1249148, G, A)(1249214, G, T)(1249244, C, T)(1249426,
C, CT)(1249473, T, C)(1249582, C, A)(1249759, T, A)(1249807, A, G)(1249829, C, T)(1250007, A,
C)(1251031, G, A)(1251201, T, C)(1251269, G, A)(1251282, G, GTA)(1251284, G, A)(1251302, A, G)(1251305,
T, G)(1251370, A, G)(1251382, C, G)(1251410, A, C)(1251456, T, C)(1251475, G, A)(1251506, A,
AC)(1251511, G, A)(1251558, G, A)(1251564, A, G)(1251566, T, G)(1251581, C, T)(1251692, A, C)(1251704,
G, A)(1251714, G, A)(1251729, A, G)(1251761, T, C)(1251772, TG, T)(1251775, C, A)(1251796, G,
A)(1251819, G, A)(1251861, G, C)(1251896, G, T)(1251898, G, C)(1251899, G, A)(1251924, G, A)(1251931, G,
T)(1251944, C, A)(1252130, G, C)(1252143, A, G)(1252180, A, AT)(1252203, T, C)(1252221, G, A)(1252227,
G, A)(1252239, C, T)(1252247, C, CATAAGTA)(1252258, A, T)(1252265, A, C)(1252321, C, T)(1252355, G,
A)(1252938, T, A)(1253830, T, C)(1257233, C, T)(1258312, T, TA)(1258331, T, TA)(1258340, T, C)(1258556,
A, T)(1258584, G, A)(1258684, G, T)(1258949, G, T)(1258966, C, T)(1258996, G, T)(1259007, G, A)(1259072,
C, T)(1259170, A, G)(1259420, T, C)(1259421, G, T)(1259452, T, TTGTTTTTTTTG)(1259454, 1, 6)(1259506, A,
T)(1259507, A, T)(1259556, A, C)(1259610, C, T)(1259695, C, T)(1259705, G, C)(1259860, C, T)(1259920, C,
G)(1259929, A, G)(1259931, G, A)(1259937, C, T)(1259938, A, G)(1262427, C, T)(1262727, T, G)(1262797, A,
G)(1262872, C, T)(1262883, C, A)(1262900, G, A)(1262916, G, A)(1262944, G, A)(1262985, G, A)(1263006, C,
T)(1263033, A, T)(1263063, A, C)(1263089, C, T)(1263138, A, G)(1263144, A, G)(1263191, G, A)(1263272, G,
A)(1263283, C, T)(1263286, T, G)(1263302, T, C)(1263711, T, TTAGA)(1263876, A, G)(1263890, T,
C)(1263937, C, T)(1263952, C, T)(1264127, A, G)(1264168, G, T)(1264220, C, T)(1264333, G, A)(1265257, G,
A)(1265326, T, G)(1265465, C, G)(1265503, G, A)(1266608, C, T)(1266856, T, C)(1267615, C, T)
(1267620, C, G)(1267621, A, T)(1267708, T, C)(1268002, G, C)(1268207, C, T)(1268256, C, T)(1268273, C,
T)(1268279, C, T)(1268287, G, A)(1268296, G, A)(1268364, A, G)(1268404, G, A)(1268414, T, C)(1268642, T,
C)(1268653, G, A)(1268677, C, T)(1268743, G, A)(1269047, G, A)(1269065, A, G)(1269077, A, T)(1269103, G,
T)(1269160, G, A)(1269230, A, G)(1269245, G, T)(1270675, A, G)(1270880, A, T)(1270895, T, C)(1271801, T,
C)(1271845, G, A)(1271882, A, G)(1271888, A, G)(1271910, C, T)(1271924, C, A)(1271934, C, A)(1271998, A,
T)(1272134, G, T)(1272205, TG, T)(1272292, A, G)(1272467, G, A)(1272497, T, C)(1272508, G, A)(1272512,
C, T)(1272527, T, C)(1272615, T, C)(1272620, G, A)(1272643, A, G)(1272656, C, T)(1272701, G, A)(1272732,
C, T)(1272824, C, A)(1272924, T, C)(1272932, C, T)(1273141, A, T)(1273146, T, C)(1273157, A, G)(1273180,
A, G)(1273201, T, A)(1273253, T, G)(1273272, A, G)(1273278, T, C)(1273280, G, A)(1273282, T, A)(1273364,
T, C)(1273366, T, A)(1273393, A, C)(1273394, C, G)(1273511, A, G)(1273523, T, C)(1273531, C, G)(1273560,
T, C)(1273580, C, G)(1273626, G, A)(1274474, A, G)(1274542, A, G)(1274553, T, C)(1274556, C, A)(1274597,
G, A)(1274598, T, C)(1274628, A, C)(1274695, A, G)(1274735, C, G)(1274750, T, C)(1274836, A, G)(1275218,
T, C)(1275518, G, A)(1275526, CT, C)(1275536, TC, T)(1275545, C, A)(1275552, T, C)(1275704, C,
T)(1275775, TGGCA, T)(1275780, G, C)(1275881, C, G)(1276156, C, A)(1276274, TTC, T)
(1276283, T, A)(1276329, G, A)(1276380, G, GTATA)(1276404, A, C)(1276463, T, C)(1276482, T, G)(1276483,
G, T)(1276760, A, C)(1276863, T, G)(1277060, T, C)(1277106, A, C)(1277580, T, C)(1277817, T, C)(1277867,
CT, C)(1277983, G, A)(1278018, G, A)(1278497, T, TTATA)(1278934, C, T)(1279015, T, A)(1279072, C,
T)(1279102, A, G)(1279157, A, G)(1279165, A, T)(1279169, G, A)(1279171, A, G)(1279199, A, G)(1279203, A,
G)(1279224, C, A)(1280071, T, A)(1280202, A, C)(1280345, C, G)(1280486, T, G)(1281059, T, A)(1281250, A,
G)(1281459, G, A)(1281531, T, G)(1281589, CA, C)(1281737, A, AT)(1281792, C, A)(1282129, A, C)(1282642,
G, A)(1282649, C, T)(1283647, GA, G)(1283742, CT, C)(1283752, G, C)(1284126, T, G)(1284151, G,
C)(1285853, A, T)(1286250, A, T)(1286339, A, G)(1286497, C, CT)(1287317, G, T)(1287708, T, G)(1287743,
C, G)(1287843, T, C)(1287844, G, A)(1287860, T, C)(1288020, C, T)(1288111, G, A)(1288125, T, C)(1288256,
A, G)(1288434, T, C)(1288740, A, C)(1288748, C, T)(1288763, A, G)(1288787, T, G)(1288821, T, C)(1288845,
G, T)(1288846, T, G)(1288863, T, C)(1288871, A, G)(1288895, C, A)(1288932, C, T)(1289028, G, A)
(1289089, A, AT)(1289129, G, A)(1289167, G, A)(1289194, G, A)(1289376, T, A)(1289387, A, G)(1289427, G,
A)(1289458, T, C)(1289491, G, A)(1289508, C, T)(1289535, A, G)(1289578, C, T)(1289642, A, G)(1289648, T,
C)(1289651, C, T)(1289701, T, G)(1289714, T, C)(1289750, A, G)(1289762, G, A)(1289779, A, C)(1289803, A,
G)(1289805, A, G)(1289813, C, T)(1289842, G, T)(1289893, G, T)(1289906, T, C)(1290001, G, T)(1290025, C,
CAT)(1290050, T, C)(1290117, C, A)(1290202, T, C)(1290342, T, C)(1290426, T, G)(1290450, C, A)(1290455,
A, T)(1290586, G, C)(1290708, C, T)(1290770, T, G)(1290775, GGTTTCTTTATAGTCAATGTC, G)(1290863, T,
C)(1290869, A, G)(1290890, T, C)(1290979, T, C)(1291169, C, G)(1291231, G, C)(1291301, T, A)(1291306, T,
C)(1291414, T, C)(1291514, T, C)(1291579, C, T)(1291594, C, T)(1291602, A, C)(1291641, A, G)(1291691, T,
G)(1291695, T, C)(1291710, G, A)(1291761, C, G)(1291765, G, T)(1291835, T, C)(1291854, C, T)(1291875,
AT, A)(1292005, A, AAG)(1292094, A, G)(1292184, C, T)(1292228, C, G)(1292332, G, A)(1292382, C,
T)(1292446, G, T)(1292467, A, G)(1292624, G, A)(1292646, T, C)(1292715, A, G)(1292830, C, T)(1292940, T,
C)(1293337, G, T)(1293376, G, A)(1293391, A, G)(1293438, C, T)(1293506, T, G)(1293536, G, A)(1293584, A,
G)(1293626, T, C)(1293643, A, T)(1293732, C, T)(1293829, C, T)(1293850, G, A)(1293891, A, G)
(1293912, A, G)(1293959, A, G)(1294050, C, T)(1294102, T, C)(1294106, C, T)(1294155, A, C)(1294275, C,
T)(1294277, A, G)(1294297, A, AT)(1294304, A, G)(1294345, T, C)(1294512, T, A)(1299795, G, T)(1299963,
G, A)(1300032, G, T)(1300494, G, A)(1300523, G, A)(1300686, A, G)(1300908, T, C)

TABLE 3
SNP Positions within SEO ID NO: 3 that are associated with increased resistance to ASR
Tab1e 3 is organized as follows: (Position in Scaffold 46213, favorable allele, unfavorable allele)

(675, G, GTATTGTCCGTGGGT)(724, G, T)(992, G, A)(1026, CGAGTAA, C)(1066, C, G)(1594, C, CT)
(9738, C, T)(9791, T, C)(10008, A, C)(11733, C, T)(11853, C, T)(11915, C, T)(11925, A, AT)(11966, C,
T)(12141, T, C)(12150, T, C)(12268, T, C)(13750, A, ATT)(13761, G, T)(13816, A, T)(13840, TTACG, T)
(13846, A, G)(14511, G, A)(15367, A, C)(15434, T, C)(15827, C, T)(17234, G, A)(18393, T, A)(20012,
A, T)(20637, T, TGTA)(21102, C, CT)(21121, T, A)(21146, C, T)(24941, G, A)(25119, C, G)(25292, G, A)
(25527, G, T)(25586, T, C)(25650, A, C)(25654, C, T)(25739, C, T)(25818, G, A)(25853, C, T)(26105,
C, T)(26109, C, T)(26128, A, G)(26136, T, G)(26141, ATTAGCGACGGAT, A)(26287, C, T)(26293,
CGCCAAGGTGGT, C)(27879, T, C)(28118, T, C)(28122, G, A)(28233, G, T)(28639, G, A)(28732, G,
A)(29169, G, T)(29346, G, A)(29606, T, C)(29635, T, C)(31019, G, A)(31052, A, G)(31078, G, A)(31111,
C, T)(31123, T, C)(31172, T, C)(31220, G, C)(31258, C, T)(31269, T, C)(31357, C, T)(31617, T,
G)(31815, G, A)(36104, C, T)(36232, A, G)(36272, G, C)(36424, T, C)(36437, A, C)(43908, C, T)(43933,
A, G)(43934, T, C)(43950, T, C)(44037, T, C)(44116, C, T)(45643, A, C)(45729, T, C)(45781, C,
T)(46192, G, A)(46625, A, G)(46928, T, A)(46946, A, AAC)(48329, A, T)(56445, A, G)(56458, A,
G)(61079, CT, C)(61154, G, C)(68034, T, A)(74278, C, A)(77941, G, A)(99064, A, G)(101059, T,
C)(110266, C, T)(110898, C, CT)(111602, G, A)(113754, A, G)(114336, TA, T)(116309, G, C)(117143, G,
A)(117721, G, A)(117900, T, C)(118052, G, A)(118069, A, G)(118134, G, T)(118253, T, C)(118497, T,
C)(119874, A, AT)(120664, C, T)(127451, G, T)(127463, T, A)(128667, T, A)(128673, T, C)(128683, TA,
T)(128690, G, A)(128735, A, T)(128918, A, G)(128931, C, A)(129022, GA, G)(129059, C, G)(130655, GT,
G)(130890, T, A)(131093, T, A)(131191, G, C)(131225, C, T)(131238, A, T)(133401, A, G)(134486, T,
C)(134506, C, G)(134573, T, C)(135856, G, GAGA)(136936, G, A)(138598, CA, C)(140689, G, A)(140877,
A, G)(141124, C, T)(141519, T, C)(141935, G, A)(142593, T, C)(143430, T, C)(144511, A, G)(144876, T,
C)(145149, A, C)(145182, G, C)(146690, C, T)(147000, C, T)(147101, T, C)(147195, T, A)(147408, A,
G)(147435, AAG, A)(148791, C, A)(149304, T, C)(151228, A, G)(151398, T, C)(151518, A, G)(151647, G,
T)(153000, T, C)(153157, T, C)(153754, T, C)(153865, T, C)(155073, T, G)(155265, A, C)(155285, T,
G)(155516, T, G)(155665, C, T)(163218, C, A)(163481, C, T)(164489, A, T)(165120, ACT, A)(165772, G,
A)(166087, C, T)(166871, A, G)(166942, C, T)(167291, C, T)(167749, A, G)(169466, G, A)(169538, T,
C)(169865, G, A)(170128, T, C)(170213, G, A)(172023, G, C)(172589, C, T)(173746, C, A)(173770, G,
A)(174166, G, C)(174692, C, A)(175752, T, C)(178012, G, A)(178065, G, A)(179351, G, A)(179884, G,
A)(179917, C, T)(179987, C, T)(180007, G, A)(180079, C, A)(180705, G, A)(180787, T, C)(181524, T,
C)(181788, C, T)(182068, C, T)(183100, A, G)(184941, G, T)185057, A, G)(185100, C, A)(185314, T,
C)(185338, C, A)(186205, A, G)(186889, G, A)(187462, C, T)(196749, T, G)(198332, C, T)(198750, A,
C)(198861, C, T)(201256, G, A)(201387, C, CA)(201408, A, G)(202531, A, T)(202554, T, C)(202654, A,
T)(204713, C, T)(204777, CACG, C)(204819, T, C)(205107, A, G)(205555, TA, T)(205583, A, T)(205606,
C, CAT)(205626, G, A)(205648, C, T)(205799, A, G)(205927, T, C)(210473, T, G)(211425, T, A)(211427,
A, T)(214026, C, T)(214812, G, A)(216538, A, ACACAATC)(219003, A, ATTTCCCACGCCTCCAACATGG)(220253, T,
TCGGG)(220259, A, C)(220260, G, C)(220540, AT, A)(220694, T, TA)(220704, G, C)(220717, G, T)(220722,
T, A)(220803, C, T)(220905, G, C)(220951, T, G)(220954, T, A)(220956, G, T)(221057, A, G)(221115,
ACCT, A)(221123, AT, A)(221133, G, C)(221167, A, T)(222335, C, CT)(222619, C, A)(222748, T,
G)(223409, G, A)(223448, A, G)(223526, C, T)(223555, T, C)(223561, T, A)(223583, G, T)(223679, A,
G)(223829, A, C)(226605, A, G)(228563, C, T)(230505, T, G)(230622, GA, G)(232227, G, A)(232269, C,
T)(232291, G, T)(233210, T, C)(233632, A, T)(234484, C, T)(234521, G, T)(234547, A, C)(234568, A,
G)(234990, A, T)(234991, T, A)(234992, C, T)(234993, T, C)(234994, C, T)(234996, T, C)(235222, A,
G)(235248, C, T)(235272, C, G)(235363, A, G)(235580, A, T)(235591, G, A)(235617, A, T)(235631, T,
G)(235642, A, G)(235660, C, T)(236460, T, C)(236576, T, C)(238235, G, A)(240006, C, T)(240091, C,
A)(240237, C, A)(240278, A, G)(240585, T, C)(240600, C, T)(240972, C, T)(241124, C, T)(241171, T,
G)(241183, T, C)(241187, T, A)(241655, C, T)(242393, T, A)(242442, G, A)(242584, A, C)(242594, A,
ACG)(242636, G, A)(245294, T, C)(246891, A, G)(246903, T, G)(246935, T, TA)(246938, T, G)(247061, T,
C)(247097, T, C)(247156, T, G)(247888, T, G)(247951, T, A)(247954, G, A)(248921, G, C)(248945, T,
A)(248975, G, A)(249010, A, T)(249035, T, C)(249161, A, T)(249170, G, A)(249199, A, G)(249210, C,
T)(249234, A, G)(249340, T, A)(249365, T, G)(249450, A, C)(249496, A, T)(250752, G, C)(251008, G,
C)(251185, T, C)(251416, C, T)(251539, A, G)(251680, G, A)(251718, A, G)(252045, C, A)(253079, A,
C)(253126, T, C)(253241, C, A)(253301, A, C)(253302, C, A)(253308, G, T)(253322, A, C)(253407, A,
T)(253417, A, G)(253421, C, G)(253427, C, T)(253434, C, T)(253456, G, T)(253685, G, T)(253732, G,
C)(255578, C, T)(255604, A, G)(255666, C, T)(255675, A, C)(258106, C, T)(258112, G, T)(258137, G,
A)(258144, C, T)(258181, C, T)(260320, C, T)(261330, G, GAGAAGCGATCAATCAGGAGAGAAAA)(261573, G,
T)(262076, TG, T)(262088, G, A)(262351, C, T)(262376, A, G)(262588, C, T)(262664, C, T)(263887, G,
A)(263888, C, G)(263998, C, T)(264076, C, A)(264127, C, T)(264129, A, G)(264167, A, G)(264179, G,
T)(264187, T, G)(264206, G, GA)(265052, C, T)(265070, G, A)(265718, A, G)(265758, A, G)(265771, A,
T)(265781, C, T)(265961, C, T)(266074, C, T)(266306, T, C)(266311, T, G)(266384, G, A)(266386, G,
A)(266410, A, C)(266423, T, C)(266437, G, A)(266482, T, C)(266543, A, C)(266556, C, T)(266565, T,
C)(266653, A, G)(266658, T, C)(266672, G, C)(266673, T, C)(266740, A, G)(267078, A, T)(267080, C,
T)(267381, C, CA)(267384, T, C)(267475, A, T)(268195, C, CA)(268311, T, TA)(268339, T, A)(268358, A,
C)(268410, C, A)(268475, T, C)(268537, A, G)(268540, A, G)(268560, T, C)(268615, G, GC)(268716, T,
A)(268741, A, C)(268753, A, T)(268861, C, T)(269056, G, A)(269094, G, A)(270104, G, A)(270166, G,
A)(270183, G, GA)(270188, C, T)(270192, T, C)(270207, T, C)(270240, T, C)(271110, C, T)(272175, G,
A)(272293, T, C)(275828, A, AG)(275945, AG, A)(275966, G, A)(276022, G, C)(276124, T, G)(276160, C,
T)(276289, A, ACTAG)(276954, C, T)(277440, T, C)(277742, C, T)(277790, T, C)(277845, C, T)(277848,
G, T)(277849, C, T)(277854, A, C)(277876, A, C)(278024, C, T)(278064, C, G)(278109, T, C)(278111, T,
A)(279552, A, G)(281770, G, A)(281910, G, A)(281919, T, G)(282027, C, G)(282222, A, G)(282557, AT,
A)(282560, G, A)(282668, TACTATGC, T)(282785, C, A)(282827, A, C)(284214, G, A)(284677, T,
C)(284682, G, T)(286198, T, A)(286392, G, A)(286614, A, T)(286643, T, A)
(286644, A, T)(286683, A, T)(287349, T, A)(287514, G, A)(287573, C, T)(294629, G, A)
(297122, C, T)(297169, A, T)(297177, C, T)(297226, C, T)(297467, T, C)(297646, C, CT)(297954, C,
CTA)(297999, T, C)(298005, A, T)(299802, C, A)(300504, T, TGAGTGAA)(300508, C, T)
(300597, TTTAA, T)(301527, G, C)(301546, G, C)(301846, T, C)(306687, T, G)(310431, G, C)
(313537, C, T)(313539, AC, A)(314333, C, A)(314334, C, T)(314954, A, AGAGAGAGAGAG)(315078, A, T)
(315087, G, T)(315255, C, A)(315488, C, T)(315634, A, C)(315755, A, G)(315874, A, G)(315881, C, G)
(315914, C, T)(315962, C, T)(316240, T, C)(316291, C, T)(316297, C, G)(316639, A, G)(316697, T, TA)
(316950, A, C)(317077, G, T)(317311, G, A)(317360, A, T)(317437, A, G)(317456, A, T)(317538, CA, C)
(317641, C, T)(318310, C, G)(318429, G, GA)(319087, C, T)(319096, A, T)(319444, G, C)(319520, G, A)
(319531, A, G)(319538, G, A)(319596, TAATA, T)(319819, A, T)(319826, A, G)(319875, A, T)(319885, A,
G)(319937, T, G)(320151, A, G)(320153, A, G)(320246, T, C)(320258, G, A)(320267, A, C)(320282, G, A)
(320287, G, A)(320363, T, C)(320373, T, C)(320428, T, TTAC)(320454, C, G)(320460, AC, A)
(321391, C, T)(322778, T, C)(322923, T, A)(322978, TA, T)(323066, A, G)(323988, C, T)(324064, C, T)
(324065, GTTTCTCAC, G)(325801, G, A)(325885, A, G)(326430, A, T)(329768, T, G)(330252, C, T)
(331439, T, C)(331563, C, T)(331586, T, TA)(331625, A, T)(331634, A, T)(331688, C, T)(331746, T, A)
(331747, T, A)(331748, T, A)(332679, A, G)(332741, A, G)(332797, C, CA)(332833, A, AT)(335072, T, C)
(335336, C, T)(335620, C, A)(336154, G, A)(336205, C, T)(337776, TA, T)(337842, G, A)(338147, C, T)
(340148, T, A)(340281, C, T)(340282, A, C)(340286, A, T)(340287, T, A)(340288, T, G)(341090, T, G)
(341347, C, T)(341349, A, G)(341357, A, G)(341359, G, T)(343883, C, G)(344196, T, C)(344449, T, G)
(344654, T, C)(344674, T, G)(350892, AGT, A)(351514, C, T)(351516, T, G)(351656, C, A)(351834, T, G)
(352175, C, A)(352198, G, A)(352442, A, T)(353130, A, T)(354235, T, C)(354276, G, A)(354707, A, AT)
(354799, G, A)(354879, G, C)(355750, T, C)(356177, T, C)(358700, G, A)(358712, T, C)(358713, A, T)
(358714, A, G)(359498, T, G)(359544, T, A)(359784, A, T)(359791, C, T)(360011, G, A)(360030, G, A)
(360044, G, A)(360053, T, C)(360332, G, A)(360393, T, C)(360413, C, T)(360530, T, A)(360940, A, G)
(361074, C, T)(361094, T, C)(361103, A, G)(361107, A, T)(361169, G, T)(363380, C, T)(363402, A, G)
(363446, A, G)(363476, C, G)(363712, C, T)(363732, TAAAAATCTTTACACGTGATTAGATGATAGGGTA, T)
(363825, G, C)(363837, TG, T)(363841, T, A)(363845, A, G)(363880, G, A)(364559, T, A)(365395, T, C)
(366143, G, A)(366341, G, A)(366626, G, A)(368189, T, C)(368196, T, C)(368204, C, T)(368673, T, G)
(368807, A, G)(368844, G, A)(368911, AACTC, A)(368943, G, A)(369079, C, T)(369082, G, A)(369122, T,
C)(369156, G, A)(369203, G, A)(369244, A, G)(369262, G, A)(369427, G, T)(369587, C, A)(371523, T, C)
(371537, A, G)(371707, T, C)(371729, G, T)(371812, TA, T)(371903, C, T)(371904, G, A)(372291, T, G)
(372732, T, TA)(372776, CAA, C)(372833, A, G)(372846, C, A)(373346, G, A)(373749, G, A)(373841, C,
G)(373957, CA, C)(374019, T, C)(374279, T, C)(374313, A, C)(374356, G, A)(374734, A, T)(374775, G,
A)(374816, G, C)(374827, G, A)(374942, C, A)(374963, C, T)(375846, C, A)(375919, A, AGAATGAAATCT)
(375932, C, T)(376093, C, CTAAGT)(376103, G, A)(376540, A, T)(376555, A, T)(376690, T, C)
(376764, C, T)(376978, G, C)(377115, T, A)(377186, C, A)(377195, T, A)(377667, CCACCGA, C)
(377905, AATTAAAAT, A)(377907, A, G)(377911, T, A)(378073, A, T)(378202, A, AAAGT)(378280, A, C)
(378290, C, C)(378358, A, T)(378368, C, T)(378375, G, C)(378380, G, A)(378393, G, A)(378659, C, T)
(378684, G, A)(378721, T, G)(378927, G, C)(379525, A, G)(379575, T, C)(379590, TG, T)(379595, C, T)
(379635, A, C)(379661, C, A)(379696, C, T)(379711, GAT, G)(379724, A, T)(379735, G, A)(379769, G, A)
(379813, A, G)(379840, G, T)(379880, G, A)(379891, G, T)(379909, TTATA, T)(381106, G, A)(381298, T,
A)(381361, G, A)(381468, T, C)(381549, TA, T)(381614, T, C)(381653, C, A)(381726, A, C)(381728, G,
A)(381753, A, C)(382163, T, C)(382355, T, A)(382408, A, C)(382440, T, C)(382481, G, C)(382536, A, T)
(382551, AAAC, A)(382684, T, C)(382688, T, C)(382841, C, T)(382849, A, T)(382913, T, C)(383029, CT,
C)(383353, A, T)(383454, A, C)(383461, A, C)(383497, A, G)(384361, T, C)(384362, C, T)(384366, C, A)
(384367, C, C)(384371, G, C)(384396, A, C)(384511, A, T)(384512, A, C)(385122, A, C)(385344, C, T)
(385360, T, G)(385924, A, C)(386081, G, C)(386901, G, T)(386906, G, A)(387197, G, C)(387514, G, C)
(387602, G, A)(387808, C, A)(387809, A, T)(387873, G, A)(387916, ACT, A)(388369, C, T)(388468, A, G)
(388501, T, TATACACA)(388503, C, C)(388506, A, G)(388508, C, C)(388509, A, G)(388510, T, C)
(388511, T, A)(388577, T, C)(388610, C, T)(388680, G, A)(388748, T, A)(388759, A, C)(388934, G, A)
(389046, GCAC, C)(389063, T, C)(389155, A, G)(389411, G, A)(389478, T, A)(389529, G, A)(390043, G,
T)(390185, A, G)(390312, A, G)(390329, T, G)(390414, T, A)(390430, T, A)(390457, A, C)(390482, G, A)
(390511, G, A)(390547, C, T)(390554, T, C)(390556, G, GA)(390586, C, T)(390587, G, A)(390594, T, A)
(391032, G, A)(391065, G, A)(391071, A, G)(391104, A, AT)(391167, A, C)(391168, T, A)(391170, G, T)
(391185, C, T)(391226, A, AT)(391279, T, C)(391284, A, C)(391298, T, G)(391306, T, C)(391309, C, T)
(391421, AT, A)(392093, T, C)(392211, G, A)(393094, G, C)(393256, T, A)(395210, G, A)(395612, G, A)
(396108, C, A)(396119, T, C)(396213, T, A)(396224, A, G)(398140, T, C)(398193, A, C)(398197, TA, T)
(398316, A, T)(399550, C, T)(399921, T, G)(400971, A, G)(400974, A, T)(400986, C, CG)(401060, C, T)
(401111, G, A)(401143, G, A)(401194, A, G)(401207, C, T)(401219, C, T)(401220, A, G)(401267, T, A)
(401300, G, A)(405230, C, T)(405327, A, G)(405492, T, A)(405832, T, C)(406076, A, G)(408155, G, A)
(408156, C, G)(408202, A, G)(409701, T, C)(409704, C, G)(409772, C, T)(410040, G, A)(410092, C, T)
(412201, G, A)(416027, C, T)(418740, C, T)(425063, A, C)(427163, C, T)(427165, C, T)(427166, C, G)
(427183, G, A)(427188, G, A)(427193, A, G)(427209, A, T)(427259, C, T)(427268, G, A)(427290, C, C)
(427301, G, T)(427308, T, C)(427333, T, C)(427364, T, A)(427600, G, A)(427758, A, C)(428049, C, T)
(428132, T, G)(428188, T, A)(428234, A, AT)(428265, A, G)(428603, A, G)(429850, C, T)(429889, A, C)
(430094, C, A)(430354, G, C)(430396, T, C)(430398, G, T)(430426, A, G)(430849, T, A)(430868, A, G)
(430978, T, G)(430984, T, A)(431061, T, A)(431085, C, T)(431107, A, G)(431122, T, C)(431140, T, C)
(431141, G, C)(431200, T, G)(431529, C, A)(432171, G, T)(432180, C, T)(432198, A, C)(432201, C, T)
(432406, C, T)(432470, A, G)(432711, C, T)(432719, A, G)(432795, G, A)(432885, G, T)(432909, C, G)
(432951, T, C)(434166, G, T)(434756, G, A)(434864, T, C)(434937, C, T)(434973, G, A)(434997, G, T)
(435003, T, G)(435060, A, G)(438008, C, T)(438087, G, C)(440387, C, T)(440421, C, T)(440422, T, C)
(444079, A, T)(444080, T, A)(448766, A, T)(451311, G, A)(452270, G, A)(452509, A, C)(453793, C, G)
(453800, A, G)(453896, G, T)(453903, T, TAA)(453921, A, C)(453931, A, G)(456596, C, T)(457850, T, G)
(457876, G, A)(457878, G, A)(457891, T, A)(458044, T, C)(458697, A, G)(458868, G, A)(459652, G, T)
(459679, G, C)(460593, C, G)(460622, C, T)(461824, G, A)(461851, C, T)(461976, G, A)(461996, G,
T)(462032, G, A)(462376, GA, G)(462799, CTA, C)(463035, T, G)(463268, A, T)(466030, T, G)(466038, C,
T)(467046, A, AAT)(467715, T, A)(467721, C, A)(467944, G, A)(471273, G, T)(474142, C, CATT)(474252,
GTT, G)(474694, A, G)(476547, TTTTC, T)(476637, GTATGTATATTCAAGGGAAA, G)(476947, C, T)(477834, A, G)
(477839, A, AG)(477846, G, A)(477935, T, C)(478533, C, T)(479662, T, G)(479684, C, T)
(479700, T, C)(479708, G, T)(479923, A, G)(483795, G, A)(484332, C, T)(484402, A, G)(484404, A, G)
(484835, T, A)(485271, G, A)(485737, AC, A)(486183, G, A)(486270, A, T)(486271, G, A)(486272, G, A)
(486318, A, G)(486356, A, G)(486586, C, T)(486875, G, A)(486934, T, C)(487693, G, A)(487744, G, T)
(487945, G, A)(487970, A, G)(487971, C, T)(488008, AC, A)(489470, G, C)(489562, C, T)(489737, G, A)
(489983, C, G)(489993, A, C)(490168, G, T)(490229, C, T)(491205, A, AAAAAC)(491373, CAA, C)(491424,
A, T)(491779, T, C)(491819, C, G)(491972, A, T)(493211, A, T)(493234, C, T)(493384, T,
TATTA)(493433, A, G)(493529, G, A)(493532, A, G)(493836, T, C)(493850, G, A)(493874, A,
AAAGAAAT)(493905, G, C)(493924, A, G)(493975, G, A)(494482, A, T)(494603, G, A)(494684, T,
C)(495174, A, T)(495187, G, A)(495200, T, G)(495415, T, C)(495643, T, C)(495644, T, A)(495674, A,
G)(495864, C, G)(496641, C, A)(496678, C, G)(497508, T, C)(499238, G, C)(499298, A, C)(500059, G,
A)(500595, C, A)(500945, A, G)(501038, C, T)(501210, C, A)(501310, TTTC, T)(501485, A, G)(502829, C,
T)(502870, A, G)(504419, G, A)(504866, A, T)(504873, G, C)(504921, A, G)(505409, C, CA)(505704, C,
T)(507217, A, T)(507238, TAA, T)(507323, T, G)(507329, T, C)(507342, A, G)(508275, A, AT)(508380, C,
T)(508461, G, T)(509277, T, C)(509283, A, C)(509292, C, A)(509303, C, T)(509524, T, C)(509525, C,
G)(509526, C, T)(510908, T, C)(510926, G, A)(510948, G, A)(510952, T, C)(511312, T, A)(511381, C,
T)(511404, C, T)(511521, C, A)(511562, C, G)(511585, T, C)(511590, G, C)(511611, G, A)(511612, G,
A)(511632, C, T)(511683, A, G)(511740, A, G)(511753, T, G)(511911, T, G)(511955, C, T)(512007, T,
A)(512044, G, T)(512137, A, G)(512540, C, T)(512589, A, G)(512618, C, G)(512645, T, C)(512646, T,
C)(512661, C, T)(512676, C, T)(512812, C, A)(513042, T, A)(513159, C, T)(513226, A, C)(513276, G,
T)(513323, C, T)(513584, T, C)(513595, G, C)(513597, T, C)(513656, C, T)(513680, T, C)(513686, T,
C)(513764, C, A)(513786, G, A)(513807, AT, A)(513824, A, T)(513838, G, A)(513874, A, C)(513895, C,
CTATCTCG)(513904, A, C)(513905, C, A)(513912, G, A)(513936, C, T)(513979, G, C)(513983, G,
A)(514008, A, G)(514017, A, C)(514027, T, A)(514046, G, A)(514051, G, T)(514057, A, G)(514065, C,
G)(514092, C, T)(514120, C, T)(514154, G, A)(515047, A, ACCGG)(515156, G, A)(515206, A, G)(517579,
C, T)(517639, G, T)(517943, T, C)(518037, T, C)(518106, T, G)(518108, C, A)(518109, A, T)(518125, C,
A)(518226, TC, T)(519354, C, T)(520078, A, G)(520080, C, T)(520107, A, G)(520159, A, G)(520212, G,
A)(520257, T, C)(520266, A, G)(533743, C, T)(534423, A, G)(534459, G, A)(538427, A, G)(540985, A,
G)(543108, A, T)(543357, TAG, T)(543557, G, A)(543606, A, T)(543625, C, T)(543640, TGAG, T)(544023,
T, TA)

[0007] Oligonucleotide primers (herein, ‘primers’) can be developed and used to identify plants carrying any one of the chromosomal intervals depicted in SEQ ID NOs 1, 2, and/or 3 found to be highly associated with ASR resistance. Specifically, one having ordinary skill in the art can develop primers to detect any single nucleotide polymorphism (herein ‘SNP’) as identified in any one of Tables 1-3 in respect to identifying or producing soybean lines having any one of or a portion of the chromosome intervals depicted in SEQ ID NOs: 1, 2, or 3 that are associated with ASR resistance. A TAQMAN® assay (e.g. generally a two-step allelic discrimination assay or similar), a KASP™ assay (generally a one-step allelic discrimination assay defined below or similar), or both can be employed to identify the SNPs that associate with increased ASR resistance as disclosed herein (e.g. favorable alleles as depicted in Tables 1-3). In an exemplary two-step assay, a forward primer, a reverse primer, and two assay probes (or hybridization oligos) are employed. The forward and reverse primers are employed to amplify genetic loci that comprise SNPs that are associated with ASR resistance loci (for example, any of the favorable alleles as shown in Tables 1-3). The particular nucleotides that are present at the SNP positions are then assayed using the assay primers (which in some embodiments are differentially labeled with, for example, fluorophores to permit distinguishing between the two assay probes in a single reaction), which in each pair differ from each other with respect to the nucleotides that are present at the SNP position (although it is noted that in any given pair, the probes can differ in their 5′ or 3′ ends without impacting their abilities to differentiate between nucleotides present at the corresponding SNP positions). In some embodiments, the assay primers and the reaction conditions are designed such that an assay primer will only hybridize to the reverse complement of a 100% perfectly matched sequence, thereby permitting identification of which allele(s) that are present based upon detection of hybridizations.

[0008] Compositions and methods for identifying, selecting, and producing Glycine plants (including wild Glycines (e.g. Glycine tomentella) and Glycine max lines) with enhanced disease resistance are provided. Disease resistant soybean plants and germplasms are also provided.

[0009] In some embodiments, methods of identifying a disease resistant soybean plant or germplasm are provided. Such methods may comprise detecting, in the soybean plant or germplasm, a genetic loci or molecular marker (e.g. SNP or a Quantitative Trait Loci (QTL)) associated with enhanced disease resistance, in particular ASR resistance. In some embodiments the genetic loci or molecular marker associates with the presence of a chromosomal interval comprising the nucleotide sequence or a portion thereof of SEQ ID NOs 1, 2 or 3 wherein the portion thereof associates with ASR resistance.

[0010] In some embodiments, methods of producing a disease resistant soybean plant are provided. Such methods may comprise detecting, in a soybean plant or germplasm, the presence of a genetic loci and/or a genetic marker associated with enhanced pathogen resistance (e.g. ASR) and producing a progeny plant from said soybean germplasm.

[0011] In some embodiments, methods of selecting a disease resistant soybean plant or germplasm are provided. Such methods may comprise crossing a first soybean plant or germplasm with a second soybean plant or germplasm, wherein the first soybean plant or germplasm comprises a genetic loci derived from any one of plant accessions PI441001, PI441008, PI446958, PI509501, PI583970, PI483224, PI499939 or a progeny plant thereof comprising any one of SEQ ID NOs 1, 2, 3 or a portion thereof associated with enhanced disease and/or ASR resistance, and/or tolerance, and selecting a progeny plant or germplasm that possesses the genetic loci.

[0012] In some embodiments, methods of introgressing a genetic loci derived from soybean accession numbers PI441001, PI441008, PI446958, PI509501, PI583970, PI499939 or PI483224 associated with enhanced pathogen resistance into a soybean plant or germplasm are provided. Such methods may comprise crossing a first soybean plant or germplasm comprising a chromosomal interval (e.g. SEQ ID Nos: 1, 2, or 3) derived from soybean accession number PI441001, PI441008, PI446958, PI509501, PI583970, PI499939 or PI483224 associated with enhanced pathogen resistance with a second soybean plant or germplasm that lacks said genetic loci and optionally repeatedly backcrossing progeny plants comprising said genetic allele with the second soybean plant or germplasm to produce an soybean plant (e.g. Glycine max) or germplasm with enhanced pathogen resistance comprising the chromosomal interval derived from soybean accession number PI441001, PI441008, PI446958, PI509501, PI583970, PI499939 or PI483224 associated with enhanced ASR resistance. Progeny comprising the chromosomal interval associated with enhanced pathogen resistance may be identified by detecting, in their genomes, the presence of a marker associated with or genetically linked to said chromosomal interval derived from soybean accession number PI441001, PI441008, PI446958, PI509501, PI583970, PI499939 or PI483224 wherein said chromosomal interval comprises SEQ ID NOs 1, 2, 3 or a portion thereof and the marker can be any of the favorable alleles as described in Tables 1-3. R-Genes from PI441001, PI441008, PI446958, PI509501, PI583970, PI499939 or PI483224 can be introgressed into a Glycine max line through the use of embryo rescue methods known by those skilled in the art for example as is disclosed in U.S. Pat. No. 7,842,850 herein incorporated by reference and through methods as described in the working Examples herein, describing a alternative method of embryo rescue.

[0013] Soybean plants and/or germplasms identified, produced or selected by the methods of this invention are also provided, as are any progeny and/or seeds derived from a soybean plant or germplasm identified, produced or selected by these methods. In one embodiment molecular markers associating with the presence of a chromosomal intervals depicted in any one of SEQ ID NOs 1, 2, or 3 may be used to identify or select for plant lines resistant to ASR. Further said molecular markers may be located within 20 cM, 10 cM, 5 cM, 4 cM, 3 cM, 2 cM, and 1 cM of said chromosomal interval or from any respective favorable allele associated with ASR resistance as depicted in any one of Tables 1-3. In another embodiment, said molecular marker may be located within 20 cM, 10 cM, 5 cM, 4 cM, 3 cM, 2 cM, 1 cM of any SNP markers associated with ASR as described in any one of Tables 1-3.

[0014] Non-naturally occurring soybean seeds, plants and/or germplasms comprising one or genetic loci derived from plant accession number PI441001, PI441008, PI446958, PI509501, PI583970, PI499939 or PI483224 (herein, ‘PI441001’, ‘PI441008’, ‘PI446958’, PI509501″, ‘PI583970’, ‘PI499939’ or ‘PI483224’) associated with enhanced pathogen resistance (e.g. ASR, Cyst Nematode, Phytopthora, etc.) are also provided. In specific embodiments said genetic loci comprise SEQ ID NOs 1, 2 or 3 and/or any favorable alleles as depicted in Tables 1-3.

[0015] A marker associated with enhanced pathogen resistance, more specifically ASR, may comprise, consist essentially of or consist of a single allele or a combination of alleles at one or more genetic loci derived from PI441001, PI441008, PI446958, PI509501, PI583970, PI499939 or PI483224 that associate with enhanced pathogen (ASR) resistance. In one embodiment the marker is within a chromosomal interval as described by SEQ ID NOs 1, 2, or 3. In another embodiment the marker is any one of the favorable alleles as depicted in Tables 1-3.

[0016] The foregoing and other objects and aspects of the present disclosure are explained in detail below.

### DETAILED DESCRIPTION

[0017] The presently disclosed subject matter relates at least in part to the identification of a genomic region (e.g. chromosomal interval(s) on Glycine tomentella Chromosome 20 derived from Glycine tomentella accession lines PI441001, PI441008, PI446958, PI509501, PI583970, PI483224, PI441008, PI499939 or progeny thereof associated with enhanced ASR resistance. As such, said chromosomal interval from PI441001, PI441008, PI446958, PI509501, PI583970, PI483224, PI441008, PI499939 or progeny thereof, may be introgressed into Glycine max lines via somatic embryo rescue (see for example U.S. Patent Publication 2007/0261139 and examples herein describing a alternative method of embryo rescue) or through the use of a Glycine max donor line having introgressed into its genome the genetic region from PI441001, PI441008, PI583970, PI499939 or PI483224, wherein the region comprises any one of SEQ ID NO: 1-3 or a portion thereof wherein presence of said genetic region is associated with increased or enhanced disease resistance to, for example, ASR, SCN, Stem termination, Stem Canker, Bacterial pustule, root knot nematode, brown stem rot, Frogeye leaf spot, or Phytophthora. In another embodiment a chromosomal interval derived from PI441001, PI441008, PI446958, PI509501, PI499939 PI583970, or PI483224 is introduced into a Glycine max line not comprising said chromosomal interval wherein said introduction confers in the Glycine max line or its progeny increased resistances to disease (e.g. ASR) wherein the said chromosome interval is derived from chromosome 20 of Glycine tomentella and further wherein said chromosomal interval comprises at least one allele that associates with the trait of increased disease resistance, such as ASR, wherein said allele is any one of the alleles respectively selected from any one as depicted in Tables 1-3. In another embodiment, the disclosure is directed to novel Glycine max plants having in their genome a chromosomal interval chosen from SEQ ID NOs: 1, 2, 3 or a portion of any thereof, wherein the chromosomal interval confers increased Asian soy rust (ASR) resistance as compared to a control plant not comprising the chromosomal interval. The current disclosure is also directed to methods for conveying pathogen resistance into non-resistant soybean germplasm using SEQ ID NOs: 1, 2, 3 or a portion of any thereof, as well as methods of selecting plants containing SEQ ID NOs: 1, 2, 3 or a portion of any thereof.

[0018] This description is not intended to be a detailed catalog of all the different ways in which the invention may be implemented, or all the features that may be added to the instant invention. For example, features illustrated with respect to one embodiment may be incorporated into other embodiments, and features illustrated with respect to a particular embodiment may be deleted from that embodiment. Thus, the invention contemplates that in some embodiments of the invention, any feature or combination of features set forth herein can be excluded or omitted. In addition, numerous variations and additions to the various embodiments suggested herein will be apparent to those skilled in the art in light of the instant disclosure, which do not depart from the instant invention. Hence, the following descriptions are intended to illustrate some particular embodiments of the invention, and not to exhaustively specify all permutations, combinations and variations thereof.

[0019] All references listed below, as well as all references cited in the instant disclosure, including but not limited to all patents, patent applications and publications thereof, scientific journal articles, and database entries (e.g., GENBANK® database entries and all annotations available therein) are incorporated herein by reference in their entireties to the extent that they supplement, explain, provide a background for, or teach methodology, techniques, and/or compositions employed herein.

### Definitions

[0020] Unless defined otherwise, all technical and scientific terms used herein have the same meaning as commonly understood to one of ordinary skill in the art to which the presently disclosed subject matter belongs.

[0021] Although the following terms are believed to be well understood by one of ordinary skill in the art, the following definitions are set forth to facilitate understanding of the presently disclosed subject matter.

[0022] As used herein, the terms “a” or “an” or “the” may refer to one or more than one. For example, “a” marker can mean one marker or a plurality of markers.

[0023] As used herein, the term “and/or” refers to and encompasses any and all possible combinations of one or more of the associated listed items, as well as the lack of combinations when interpreted in the alternative (“or”).

[0024] As used herein, the term “about,” when used in reference to a measurable value such as an amount of mass, dose, time, temperature, and the like, is meant to encompass variations of up to 10% of the specified amount.

[0025] The term “consists essentially of” (and grammatical variants thereof), as applied to a polynucleotide sequence of this invention, means a polynucleotide sequence that consists of both the recited sequence (e.g., SEQ ID NO) and a total of ten or less (e.g., 1, 2, 3, 4, 5, 6, 7, 8, 9, or 10) additional nucleotides on the 5′ and/or 3′ ends of the recited sequence such that the function of the polynucleotide is not materially altered. The total of ten or less additional nucleotides includes the total number of additional nucleotides on both ends added together. The term “materially altered,” as applied to polynucleotides of the invention, refers to an increase or decrease in ability to express the polynucleotide sequence of at least about 50% or more as compared to the expression level of a polynucleotide sequence consisting of the recited sequence.

[0026] The term “introduced” as used herein, in connection to a plant, means accomplished by any manner including but not limited to; introgression, transgenic, Clustered Regularly Interspaced Short Palindromic Repeats modification (CRISPR), Transcription activator-like effector nucleases (TALENs) (Feng et al. 2013, Joung & Sander 2013), meganucleases, or zinc finger nucleases (ZFNs).

[0027] As used herein, the term “wild glycine” refers to a perennial Glycine plant, for example any one of G. canescens, G. argyrea, G. clandestine, G. latrobeana, G. albicans, G. aphyonota, G. arenaria, G. curvata, G. cyrtoloba, G. dolichocarpa, G. falcate, G. gracei, G. hirticaulis, G. lactovirens, G. latifolia, G. microphylla, G. montis-douglas, G. peratosa, G. pescadrensis, G. pindanica, G. pullenii, G. rubiginosa, G. stenophita, G. syndetika, or G. tomentella.

[0028] As used herein, the term “allele” refers to one of two or more different nucleotides or nucleotide sequences that occur at a specific locus.

[0029] A marker is “associated with” a trait when it is linked to it and when the presence of the marker is an indicator of whether and/or to what extent the desired trait or trait form will occur in a plant/germplasm comprising the marker. Similarly, a marker is “associated with” an allele when it is linked to it and when the presence of the marker is an indicator of whether the allele is present in a plant/germplasm comprising the marker. For example, “a marker associated with enhanced pathogen resistance” refers to a marker whose presence or absence can be used to predict whether and/or to what extent a plant will display a pathogen resistant phenotype (e.g. any favorable SNP allele as described in Tables 1-3 are “associated with” ASR resistance in a soybean plant).

[0030] As used herein, the terms “backcross” and “backcrossing” refer to the process whereby a progeny plant is repeatedly crossed back to one of its parents. In a backcrossing scheme, the “donor” parent refers to the parental plant with the desired gene or locus to be introgressed. The “recipient” parent (used one or more times) or “recurrent” parent (used two or more times) refers to the parental plant into which the gene or locus is being introgressed. For example, see Ragot, M. et al. Marker-assisted Backcrossing: A Practical Example, in TECHNIQUES ET UTILISATIONS DES MARQUEURS MOLECULAIRES LES COLLOQUES, Vol. 72, pp. 45-56 (1995); and Openshaw et al., Marker-assisted Selection in Backcross Breeding, in PROCEEDINGS OF THE SYMPOSIUM “ANALYSIS OF MOLECULAR MARKER DATA,” pp. 41-53 (1994). The initial cross gives rise to the F1 generation. The term “BC1” refers to the second use of the recurrent parent, “BC2” refers to the third use of the recurrent parent, and so on.

[0031] A centimorgan (“cM”) is a unit of measure of recombination frequency. One cM is equal to a 1% chance that a marker at one genetic locus will be separated from a marker at a second locus due to crossing over in a single generation.

[0032] As used herein, the term “chromosomal interval defined by and including,” used in reference to particular loci and/or alleles, refers to a chromosomal interval delimited by and encompassing the stated loci/alleles.

[0033] As used herein, the terms “cross” or “crossed” refer to the fusion of gametes via pollination to produce progeny (e.g., cells, seeds or plants). The term encompasses both sexual crosses (the pollination of one plant by another) and selfing (self-pollination, e.g., when the pollen and ovule are from the same plant). The term “crossing” refers to the act of fusing gametes via pollination to produce progeny.

[0034] As used herein, the terms “cultivar” and “variety” refer to a group of similar plants that by structural or genetic features and/or performance can be distinguished from other varieties within the same species.

[0035] As used herein, the terms “desired allele”, “favorable allele” and “allele of interest” are used interchangeably to refer to an allele associated with a desired trait (e.g. ASR resistance).

[0036] As used herein, the terms “enhanced pathogen resistance” or “enhanced disease resistance” refers to an improvement, enhancement, or increase in a plant's ability to endure and/or thrive despite being infected with a disease (e.g. Asian soybean rust) as compared to one or more control plants (e.g., one or both of the parents, or a plant lacking a marker associated with enhanced pathogen resistance to respective pathogen/disease). Enhanced disease resistance includes any mechanism (other than whole-plant immunity or resistance) that reduces the expression of symptoms indicative of infection for a respective disease such as Asian soybean rust, soybean cyst nematode, Phytophthora, etc.

[0037] An “elite line” or “elite strain” is an agronomically superior line that has resulted from many cycles of breeding and selection for superior agronomic performance Numerous elite lines are available and known to those of skill in the art of soybean breeding. An “elite population” is an assortment of elite individuals or lines that can be used to represent the state of the art in terms of agronomically superior genotypes of a given crop species, such as soybean. Similarly, an “elite germplasm” or elite strain of germplasm is an agronomically superior germplasm, typically derived from and/or capable of giving rise to a plant with superior agronomic performance, such as an existing or newly developed elite line of soybean.

[0038] An “elite” plant is any plant from an elite line, such that an elite plant is a representative plant from an elite variety. Non-limiting examples of elite soybean varieties that are commercially available to farmers or soybean breeders include: AG00802, A0868, AG0902, A1923, AG2403, A2824, A3704, A4324, A5404, AG5903, AG6202 AG0934; AG1435; AG2031; AG2035; AG2433; AG2733; AG2933; AG3334; AG3832; AG4135; AG4632; AG4934; AG5831; AG6534; and AG7231 (Asgrow Seeds, Des Moines, Iowa, USA); BPRO144RR, BPR 4077NRR and BPR 4390NRR (Bio Plant Research, Camp Point, Ill., USA); DKB17-51 and DKB37-51 (DeKalb Genetics, DeKalb, Ill., USA); DP 4546 RR, and DP 7870 RR (Delta & Pine Land Company, Lubbock, Tex., USA); JG 03R501, JG 32R606C ADD and JG 55R503C (JGL Inc., Greencastle, Ind., USA); NKS 13-K2 (NK Division of Syngenta Seeds, Golden Valley, Minn., USA); 90M01, 91M30, 92M33, 93M11, 94M30, 95M30, 97B52, P008T22R2; P16T17R2; P22T69R; P25T51R; P34T07R2; P35T58R; P39T67R; P47T36R; P46T21R; and P56T03R2 (Pioneer Hi-Bred International, Johnston, Iowa, USA); SG4771NRR and SG5161NRR/STS (Soygenetics, LLC, Lafayette, Ind., USA); S00-K5, S11-L2, S28-Y2, S43-B1, S53-A1, S76-L9, S78-G6, S0009-M2; S007-Y4; S04-D3; S14-A6; S20-T6; S21-M7; S26-P3; S28-N6; S30-V6; S35-C3; S36-Y6; S39-C4; S47-K5; S48-D9; S52-Y2; S58-Z4; S67-R6; S73-S8; and S78-G6 (Syngenta Seeds, Henderson, Ky., USA); Richer (Northstar Seed Ltd. Alberta, Calif.); 14RD62 (Stine Seed Co. Ia., USA); or Armor 4744 (Armor Seed, LLC, Ar., USA).

[0039] The terms “agronomically elite” as used herein, means a genotype that has a culmination of many distinguishable traits such as emergence, vigor, vegetative vigor, disease resistance, seed set, standability, yield and threshability which allows a producer to harvest a product of commercial significance.

[0040] As used herein, the term “commercially significant yield” or “agronomically acceptable yield” refers to a grain yield of at least 100% of a commercial check variety such as AG2703 or DKB23-51.

[0041] As used herein, the terms “exotic,” “exotic line” and “exotic germplasm” refer to any plant, line or germplasm that is not elite. In general, exotic plants/germplasms are not derived from any known elite plant or germplasm, but rather are selected to introduce one or more desired genetic elements into a breeding program (e.g., to introduce novel alleles into a breeding program).

[0042] A “genetic map” is a description of genetic linkage relationships among loci on one or more chromosomes within a given species, generally depicted in a diagrammatic or tabular form. For each genetic map, distances between loci are measured by the recombination frequencies between them. Recombinations between loci can be detected using a variety of markers. A genetic map is a product of the mapping population, types of markers used, and the polymorphic potential of each marker between different populations. The order and genetic distances between loci can differ from one genetic map to another.

[0043] As used herein, the term “genotype” refers to the genetic constitution of an individual (or group of individuals) at one or more genetic loci, as contrasted with the observable and/or detectable and/or manifested trait (the phenotype). Genotype is defined by the allele(s) of one or more known loci that the individual has inherited from its parents. The term genotype can be used to refer to an individual's genetic constitution at a single locus, at multiple loci, or more generally, the term genotype can be used to refer to an individual's genetic make-up for all the genes in its genome. Genotypes can be indirectly characterized, e.g., using markers and/or directly characterized by nucleic acid sequencing.

[0044] As used herein, the term “germplasm” refers to genetic material of or from an individual (e.g., a plant), a group of individuals (e.g., a plant line, variety or family), or a clone derived from a line, variety, species, or culture. The germplasm can be part of an organism or cell, or can be separate from the organism or cell. In general, germplasm provides genetic material with a specific molecular makeup that provides a physical foundation for some or all of the hereditary qualities of an organism or cell culture. As used herein, germplasm may refer to seeds, cells (including protoplasts and calli) or tissues from which new plants may be grown, as well as plant parts that can be cultured into a whole plant (e.g., stems, buds, roots, leaves, etc.).

[0045] A “haplotype” is the genotype of an individual at a plurality of genetic loci, i.e., a combination of alleles. Typically, the genetic loci that define a haplotype are physically and genetically linked, i.e., on the same chromosome segment. The term “haplotype” can refer to polymorphisms at a particular locus, such as a single marker locus, or polymorphisms at multiple loci along a chromosomal segment.

[0046] As used herein, the term “heterozygous” refers to a genetic status wherein different alleles reside at corresponding loci on homologous chromosomes.

[0047] As used herein, the term “homozygous” refers to a genetic status wherein identical alleles reside at corresponding loci on homologous chromosomes.

[0048] As used herein, the term “hybrid” refers to a seed and/or plant produced when at least two genetically dissimilar parents are crossed.

[0049] As used herein, the term “inbred” refers to a substantially homozygous plant or variety. The term may refer to a plant or variety that is substantially homozygous throughout the entire genome or that is substantially homozygous with respect to a portion of the genome that is of particular interest.

[0050] As used herein, the term “indel” refers to an insertion or deletion in a pair of nucleotide sequences, wherein a first sequence may be referred to as having an insertion relative to a second sequence or the second sequence may be referred to as having a deletion relative to the first sequence.

[0051] As used herein, the terms “introgression,” “introgressing” and “introgressed” refer to both the natural and artificial transmission of a desired allele or combination of desired alleles of a genetic locus or genetic loci from one genetic background to another. For example, a desired allele at a specified locus can be transmitted to at least one progeny via a sexual cross between two parents of the same species, where at least one of the parents has the desired allele in its genome. Alternatively, for example, transmission of an allele can occur by recombination between two donor genomes, e.g., in a fused protoplast, where at least one of the donor protoplasts has the desired allele in its genome. The desired allele may be a selected allele of a marker, a QTL, a transgene, or the like. Offspring comprising the desired allele can be repeatedly backcrossed to a line having a desired genetic background and selected for the desired allele, with the result being that the desired allele becomes fixed in the desired genetic background. For example, a marker associated with enhanced ASR tolerance may be introgressed from a donor into a recurrent parent that is not disease resistant. The resulting offspring could then be repeatedly backcrossed and selected until the progeny possess the ASR tolerance allele(s) in the recurrent parent background.

[0052] As used herein, the term “linkage” refers to the degree with which one marker locus is associated with another marker locus or some other locus (for example, an ASR tolerance locus). The linkage relationship between a molecular marker and a phenotype may be given as a “probability” or “adjusted probability.” Linkage can be expressed as a desired limit or range. For example, in some embodiments, any marker is linked (genetically and physically) to any other marker when the markers are separated by less than about 50, 40, 30, 25, 20, or 15 map units (or cM). For example, embodiments of the invention herein, provide for marker loci closely linked to ASR resistant chromosomal intervals comprising a nucleotide sequence of any one of SEQ ID NOs 1-3.

[0053] In some aspects of the present invention, it is advantageous to define a bracketed range of linkage, for example, from about 10 cM and about 20 cM, from about 10 cM and about 30 cM, or from about 10 cM and about 40 cM. The more closely a marker is linked to a second locus, the better an indicator for the second locus that marker becomes. Thus, “closely linked loci” such as a marker locus and a second locus display an inter-locus recombination frequency of about 10%, 9%, 8%, 7%, 6%, 5%, 4%, 3%, or 2% or less. In some embodiments, the relevant loci display a recombination frequency of about 1% or less, e.g., about 0.75%, 0.5%, 0.25% or less. Two loci that are localized to the same chromosome, and at such a distance that recombination between the two loci occurs at a frequency of less than about 10% (e.g., about 9%, 8%, 7%, 6%, 5%, 4%, 3%, 2%, 1%, 0.75%, 0.5%, or 0.25%, or less) may also be said to be “proximal to” each other. Since one cM is the distance between two markers that show a 1% recombination frequency, any marker is closely linked (genetically and physically) to any other marker that is in close proximity, e.g., at or less than about 10 cM distant. Two closely linked markers on the same chromosome may be positioned about 9, 8, 7, 6, 5, 4, 3, 2, 1, 0.75, 0.5 or 0.25 cM or less from each other.

[0054] As used herein, the term “linkage disequilibrium” refers to a non-random segregation of genetic loci or traits (or both). In either case, linkage disequilibrium implies that the relevant loci are within sufficient physical proximity along a length of a chromosome so that they segregate together with greater than random (i.e., non-random) frequency (in the case of co-segregating traits, the loci that underlie the traits are in sufficient proximity to each other). Markers that show linkage disequilibrium are considered linked. Linked loci co-segregate more than 50% of the time, e.g., from about 51% to about 100% of the time. In other words, two markers that co-segregate have a recombination frequency of less than 50% (and, by definition, are separated by less than 50 cM on the same chromosome). As used herein, linkage can be between two markers, or alternatively between a marker and a phenotype. A marker locus can be “associated with” (linked to) a trait, e.g., Asian Soybean Rust. The degree of linkage of a molecular marker to a phenotypic trait is measured, e.g., as a statistical probability of co-segregation of that molecular marker with the phenotype.

[0055] Linkage disequilibrium is most commonly assessed using the measure r², which is calculated using the formula described by Hill and Robertson, Theor. Appl. Genet. 38:226 (1968). When r²=1, complete linkage disequilibrium exists between the two marker loci, meaning that the markers have not been separated by recombination and have the same allele frequency. Values for r² above ⅓ indicate sufficiently strong linkage disequilibrium to be useful for mapping. Ardlie et al., Nature Reviews Genetics 3:299 (2002). Hence, alleles are in linkage disequilibrium when r² values between pairwise marker loci are greater than or equal to about 0.33, 0.4, 0.5, 0.6, 0.7, 0.8, 0.9, or 1.0.

[0056] As used herein, the term “linkage equilibrium” describes a situation where two markers independently segregate, i.e., sort among progeny randomly. Markers that show linkage equilibrium are considered unlinked (whether or not they lie on the same chromosome).

[0057] A “locus” is a position on a chromosome where a gene or marker or allele is located. In some embodiments, a locus may encompass one or more nucleotides.

[0058] As used herein, the terms “marker” and “genetic marker” are used interchangeably to refer to a nucleotide and/or a nucleotide sequence that has been associated with a phenotype, trait or trait form. In some embodiments, a marker may be associated with an allele or alleles of interest and may be indicative of the presence or absence of the allele or alleles of interest in a cell or organism. A marker may be, but is not limited to, an allele, a gene, a haplotype, a restriction fragment length polymorphism (RFLP), a simple sequence repeat (SSR), random amplified polymorphic DNA (RAPD), cleaved amplified polymorphic sequences (CAPS) (Rafalski and Tingey, Trends in Genetics 9:275 (1993)), an amplified fragment length polymorphism (AFLP) (Vos et al., Nucleic Acids Res. 23:4407 (1995)), a single nucleotide polymorphism (SNP) (Brookes, Gene 234:177 (1993)), a sequence-characterized amplified region (SCAR) (Paran and Michelmore, Theor. Appl. Genet. 85:985 (1993)), a sequence-tagged site (STS) (Onozaki et al., Euphytica 138:255 (2004)), a single-stranded conformation polymorphism (SSCP) (Orita et al., Proc. Natl. Acad. Sci. USA 86:2766 (1989)), an inter-simple sequence repeat (ISSR) (Blair et al., Theor. Appl. Genet. 98:780 (1999)), an inter-retrotransposon amplified polymorphism (IRAP), a retrotransposon-microsatellite amplified polymorphism (REMAP) (Kalendar et al., Theor. Appl. Genet. 98:704 (1999)), a chromosome interval, or an RNA cleavage product (such as a Lynx tag). A marker may be present in genomic or expressed nucleic acids (e.g., ESTs). The term marker may also refer to nucleic acids used as probes or primers (e.g., primer pairs) for use in amplifying, hybridizing to and/or detecting nucleic acid molecules according to methods well known in the art. A large number of soybean molecular markers are known in the art, and are published or available from various sources, such as the SoyBase internet resource.

[0059] Markers corresponding to genetic polymorphisms between members of a population can be detected by methods well-established in the art. These include, e.g., nucleic acid sequencing, hybridization methods, amplification methods (e.g., PCR-based sequence specific amplification methods), detection of restriction fragment length polymorphisms (RFLP), detection of isozyme markers, detection of polynucleotide polymorphisms by allele specific hybridization (ASH), detection of amplified variable sequences of the plant genome, detection of self-sustained sequence replication, detection of simple sequence repeats (SSRs), detection of single nucleotide polymorphisms (SNPs), and/or detection of amplified fragment length polymorphisms (AFLPs). Well established methods are also known for the detection of expressed sequence tags (ESTs) and SSR markers derived from EST sequences and randomly amplified polymorphic DNA (RAPD).

[0060] A “marker allele,” also described as an “allele of a marker locus,” can refer to one of a plurality of polymorphic nucleotide sequences found at a marker locus in a population that is polymorphic for the marker locus.

[0061] “Marker-assisted selection” (MAS) is a process by which phenotypes are selected based on marker genotypes. In some embodiments, marker genotypes are used to identify plants that will be selected for a breeding program or for planting. In some embodiments, marker genotypes are used to identify plants that will not be selected for a breeding program or for planting (i.e., counter-selected plants), allowing them to be removed from the breeding/planting population.

[0062] As used herein, the terms “marker locus” and “marker loci” refer to a specific chromosome location or locations in the genome of an organism where a specific marker or markers can be found. A marker locus can be used to track the presence of a second linked locus, e.g., a linked locus that encodes or contributes to expression of a phenotypic trait. For example, a marker locus can be used to monitor segregation of alleles at a locus, such as a QTL or single gene, that are genetically or physically linked to the marker locus.

[0063] As used herein, the terms “marker probe” and “probe” refer to a nucleotide sequence or nucleic acid molecule that can be used to detect the presence of one or more particular alleles within a marker locus (e.g., a nucleic acid probe that is complementary to all of or a portion of the marker or marker locus, through nucleic acid hybridization). Marker probes comprising about 8, 10, 15, 20, 30, 40, 50, 60, 70, 80, 90, 100 or more contiguous nucleotides may be used for nucleic acid hybridization. Alternatively, in some aspects, a marker probe refers to a probe of any type that is able to distinguish (i.e., genotype) the particular allele that is present at a marker locus.

[0064] As used herein, the terms “molecular marker” or “genetic marker” may be used to refer to a genetic marker, as defined above, or an encoded product thereof (e.g., a protein) used as a point of reference when identifying a linked locus. A molecular marker can be derived from genomic nucleotide sequences or from expressed nucleotide sequences (e.g., from a spliced RNA, a cDNA, etc.). The term also refers to nucleotide sequences complementary to or flanking the marker sequences, such as nucleotide sequences used as probes and/or primers capable of amplifying the marker sequence. Nucleotide sequences are “complementary” when they specifically hybridize in solution, e.g., according to Watson-Crick base pairing rules. Some of the markers described herein are also referred to as hybridization markers when located on an indel region. This is because the insertion region is, by definition, a polymorphism vis-ã-vis a plant without the insertion. Thus, the marker need only indicate whether the indel region is present or absent. Any suitable marker detection technology may be used to identify such a hybridization marker, e.g., SNP technology is used in the examples provided herein.

[0065] A “non-naturally occurring variety of soybean” is any variety of soybean that does not naturally exist in nature. A “non-naturally occurring variety of soybean” may be produced by any method known in the art, including, but not limited to, transforming a soybean plant or germplasm, transfecting a soybean plant or germplasm and crossing a naturally occurring variety of soybean with a non-naturally occurring variety of soybean. In some embodiments, a “non-naturally occurring variety of soybean” may comprise one of more heterologous nucleotide sequences. In some embodiments, a “non-naturally occurring variety of soybean” may comprise one or more non-naturally occurring copies of a naturally occurring nucleotide sequence (i.e., extraneous copies of a gene that naturally occurs in soybean). In some embodiments, a “non-naturally occurring variety of soybean” may comprise a non-natural combination of two or more naturally occurring nucleotide sequences (i.e., two or more naturally occurring genes that do not naturally occur in the same soybean, for instance genes not found in Glycine max lines).

[0066] As used herein, the term “primer” refers to an oligonucleotide which is capable of annealing to a nucleic acid target and serving as a point of initiation of DNA synthesis when placed under conditions in which synthesis of a primer extension product is induced (e.g., in the presence of nucleotides and an agent for polymerization such as DNA polymerase and at a suitable temperature and pH). A primer (in some embodiments an extension primer and in some embodiments an amplification primer) is in some embodiments single stranded for maximum efficiency in extension and/or amplification. In some embodiments, the primer is an oligodeoxyribonucleotide. A primer is typically sufficiently long to prime the synthesis of extension and/or amplification products in the presence of the agent for polymerization. The minimum length of the primer can depend on many factors, including, but not limited to temperature and composition (A/T vs. G/C content) of the primer. In the context of amplification primers, these are typically provided as a pair of bi-directional primers consisting of one forward and one reverse primer or provided as a pair of forward primers as commonly used in the art of DNA amplification such as in PCR amplification. As such, it will be understood that the term “primer,” as used herein, can refer to more than one primer, particularly in the case where there is some ambiguity in the information regarding the terminal sequence(s) of the target region to be amplified. Hence, a “primer” can include a collection of primer oligonucleotides containing sequences representing the possible variations in the sequence or includes nucleotides which allow a typical base pairing. Primers can be prepared by any suitable method known in the art. Methods for preparing oligonucleotides of specific sequence are known in the art, and include, for example, cloning and restriction of appropriate sequences and direct chemical synthesis. Chemical synthesis methods can include, for example, the phospho di- or tri-ester method, the diethylphosphoramidate method and the solid support method disclosed in U.S. Pat. No. 4,458,066. Primers can be labeled, if desired, by incorporating detectable moieties by for instance spectroscopic, fluorescence, photochemical, biochemical, immunochemical, or chemical moieties. Primers diagnostic (i.e. able to identify or select based on presence of ASR resistant alleles) for ASR resistance can be created to any favorable SNP as described in any one of Tables 1-3. The PCR method is well described in handbooks and known to the skilled person. After amplification by PCR, target polynucleotides can be detected by hybridization with a probe polynucleotide, which forms a stable hybrid with the target sequence under stringent to moderately stringent hybridization and wash conditions. If it is expected that the probes are essentially completely complementary (i.e., about 99% or greater) to the target sequence, stringent conditions can be used. If some mismatching is expected, for example if variant strains are expected with the result that the probe will not be completely complementary, the stringency of hybridization can be reduced. In some embodiments, conditions are chosen to rule out non-specific/adventitious binding. Conditions that affect hybridization, and that select against non-specific binding are known in the art, and are described in, for example, Sambrook & Russell (2001). Molecular Cloning: A Laboratory Manual, Third Edition, Cold Spring Harbor Laboratory Press, Cold Spring Harbor, N.Y., United States of America. Generally, lower salt concentration and higher temperature hybridization and/or washes increase the stringency of hybridization conditions.

[0067] As used herein, the terms “phenotype,” “phenotypic trait” or “trait” refer to one or more traits and/or manifestations of an organism. The phenotype can be a manifestation that is observable to the naked eye, or by any other means of evaluation known in the art, e.g., microscopy, biochemical analysis, or an electromechanical assay. In some cases, a phenotype or trait is directly controlled by a single gene or genetic locus, i.e., a “single gene trait.” In other cases, a phenotype or trait is the result of several genes. It is noted that, as used herein, the term “disease resistant phenotype” takes into account environmental conditions that might affect the respective disease such that the effect is real and reproducible.

[0068] As used herein, the term “plant” may refer to a whole plant, any part thereof, or a cell or tissue culture derived from a plant. Thus, the term “plant” can refer to any of: whole plants, plant components or organs (e.g., roots, stems, leaves, buds, flowers, pods, etc.), plant tissues, seeds and/or plant cells. A plant cell is a cell of a plant, taken from a plant, or derived through culture from a cell taken from a plant. Thus, the term “soybean plant” may refer to a whole soybean plant, one or more parts of a soybean plant (e.g., roots, root tips, stems, leaves, buds, flowers, pods, seeds, cotyledons, etc.), soybean plant cells, soybean plant protoplasts and/or soybean plant calli.

[0069] As used herein, the term “plant part” includes but is not limited to embryos, pollen, seeds, leaves, flowers (including but not limited to anthers, ovules and the like), fruit, stems or branches, roots, root tips, cells including cells that are intact in plants and/or parts of plants, protoplasts, plant cell tissue cultures, plant calli, plant clumps, and the like. Thus, a plant part includes soybean tissue culture from which soybean plants can be regenerated. Further, as used herein, “plant cell” refers to a structural and physiological unit of the plant, which comprises a cell wall and also may refer to a protoplast. A plant cell of the present invention can be in the form of an isolated single cell or can be a cultured cell or can be a part of a higher-organized unit such as, for example, a plant tissue or a plant organ.

[0070] As used herein, the term “polymorphism” refers to a variation in the nucleotide sequence at a locus, where said variation is too common to be due merely to a spontaneous mutation. A polymorphism can be a single nucleotide polymorphism (SNP) or an insertion/deletion polymorphism, also referred to herein as an “indel.” Additionally, the variation can be in a transcriptional profile or a methylation pattern. The polymorphic site or sites of a nucleotide sequence can be determined by comparing the nucleotide sequences at one or more loci in two or more germplasm entries.

[0071] As used herein, the terms “closely linked” refers to linked markers displaying a cross over frequency with a given marker of about 10% or less (e.g. the given marker is within about 10 cM of a closely linked ASR marker). Put another way, closely linked loci co-segregate at least about 90% of the time. With regard to physical position on a chromosome, closely linked markers can be separated, for example, by about 1 megabase (Mb; 1 million nucleotides), about 500 kilobases (Kb; 1000 nucleotides), about 400 Kb, about 300 Kb, about 200 Kb, about 100 Kb, about 50 Kb, about 25 Kb, about 10 Kb, about 5 Kb, about 4 Kb, about 3 Kb, about 2 Kb, about 1 Kb, about 500 nucleotides, about 250 nucleotides, or less.

[0072] As used herein, the term “population” refers to a genetically heterogeneous collection of plants sharing a common genetic derivation.

[0073] As used herein, the terms “progeny” and “progeny plant” refer to a plant generated from a vegetative or sexual reproduction from one or more parent plants. A progeny plant may be obtained by cloning or selfing a single parent plant, or by crossing two parental plants.

[0074] As used herein, the term “reference sequence” refers to a defined nucleotide sequence used as a basis for nucleotide sequence comparison. The reference sequence for a marker, for example, is obtained by genotyping a number of lines at the locus or loci of interest, aligning the nucleotide sequences in a sequence alignment program, and then obtaining the consensus sequence of the alignment. Hence, a reference sequence identifies the polymorphisms in alleles at a locus. A reference sequence may not be a copy of an actual nucleic acid sequence from any particular organism; however, it is useful for designing primers and probes for actual polymorphisms in the locus or loci.

[0075] As used herein, the terms “disease tolerance” and “disease resistant” refer to a plant's ability to endure and/or thrive despite being infected with a respective disease. When used in reference to germplasm, the terms refer to the ability of a plant that arises from that germplasm to endure and/or thrive despite being infected with a respective disease. In some embodiments, infected Disease resistant soybean plants may yield as well (or nearly as well) as uninfected soybean plants. In general, a plant or germplasm is labeled as “Disease resistant” if it displays “enhanced pathogen resistance.”

[0076] An “unfavorable allele” of a marker is a marker allele that segregates with the unfavorable plant phenotype, therefore providing the benefit of identifying plants that can be removed from a breeding program or planting. For instance, one could eliminate from a plant breeding program plant lines carrying unfavorable alleles for ASR resistance.

[0077] “PI441001, PI441008, PI583970, PI499939 or PI483224,” refers to Glycine tomentella plant accession number PI441001, PI441008, PI583970, PI499939 or PI483224.

### Genetic Mapping

[0078] Genetic loci correlating with particular phenotypes, such as disease resistance, can be mapped in an organism's genome. By identifying a marker or cluster of markers that co-segregate with a trait of interest, the breeder is able to rapidly select a desired phenotype by selecting for the proper marker (a process called marker-assisted selection, or “MAS”). Such markers may also be used by breeders to design genotypes in silico and to practice whole genome selection.

[0079] The present invention provides markers associated with enhanced disease resistance. Detection of these markers and/or other linked markers can be used to identify, select and/or produce disease resistant, more specifically ASR resistant, plants and/or to eliminate plants that are not disease resistant from breeding programs or planting.

### Glycine Tomentella Genetic Loci Associated with Enhanced Disease Resistance

[0080] Markers associated with enhanced disease resistance are identified herein (see Tables 1-3 indicating favorable markers associated with enhanced ASR resistance). A marker of the present invention may comprise a single allele or a combination of alleles at one or more genetic loci (for example, any combination of a favorable markers from Tables 1-3). For example, the marker may comprise one or more marker alleles located within a first chromosomal interval (e.g. SEQ ID NO: 1) and one or more marker alleles located within a second chromosomal interval (e.g. SEQ ID NO: 2 or SEQ ID NO: 3).

### Marker-Assisted Selection

[0081] Markers can be used in a variety of plant breeding applications. See, e.g., Staub et al., Hortscience 31: 729 (1996); Tanksley, Plant Molecular Biology Reporter 1: 3 (1983). One of the main areas of interest is to increase the efficiency of backcrossing and introgressing genes using marker-assisted selection (MAS). In general, MAS takes advantage of genetic markers that have been identified as having a significant likelihood of co-segregation with a desired trait. Such markers are presumed to be in/near the gene(s) that give rise to the desired phenotype, and their presence indicates that the plant will possess the desired trait. Plants which possess the marker are expected to transfer the desired phenotype to their progeny.

[0082] A marker that demonstrates linkage with a locus affecting a desired phenotypic trait provides a useful tool for the selection of the trait in a plant population. This is particularly true where the phenotype is hard to assay or occurs at a late stage in plant development. Since DNA marker assays are less laborious and take up less physical space than field phenotyping, much larger populations can be assayed, increasing the chances of finding a recombinant with the target segment from the donor line moved to the recipient line. The closer the linkage, the more useful the marker, as recombination is less likely to occur between the marker and the gene causing or imparting the trait. Having flanking markers decreases the chances that false positive selection will occur. The ideal situation is to have a marker within the causative gene itself, so that recombination cannot occur between the marker and the gene. Such a marker is called a “perfect marker”.

[0083] When a gene is introgressed by MAS, it is not only the gene that is introduced but also the flanking regions. Gepts, Crop Sci 42:1780 (2002). This is referred to as “linkage drag.” In the case where the donor plant is highly unrelated to the recipient plant, these flanking regions carry additional genes that may code for agronomically undesirable traits. This “linkage drag” may also result in reduced yield or other negative agronomic characteristics even after multiple cycles of backcrossing into the elite soybean line. This is also sometimes referred to as “yield drag.” The size of the flanking region can be decreased by additional backcrossing, although this is not always successful, as breeders do not have control over the size of the region or the recombination breakpoints. Young et al., Genetics 120:579 (1998). In classical breeding, it is usually only by chance that recombinations that contribute to a reduction in the size of the donor segment are selected. Tanksley et al., Biotechnology 7: 257 (1989). Even after 20 backcrosses, one might find a sizeable piece of the donor chromosome still linked to the gene being selected. With markers, however, it is possible to select those rare individuals that have experienced recombination near the gene of interest. In 150 backcross plants, there is a 95% chance that at least one plant will have experienced a crossover within 1 cM of the gene, based on a single meiosis map distance. Markers allow for unequivocal identification of those individuals. With one additional backcross of 300 plants, there would be a 95% chance of a crossover within 1 cM single meiosis map distance of the other side of the gene, generating a segment around the target gene of less than 2 cM based on a single meiosis map distance. This can be accomplished in two generations with markers, while it would have required on average 100 generations without markers. See Tanksley et al., supra. When the exact location of a gene is known, flanking markers surrounding the gene can be utilized to select for recombinations in different population sizes. For example, in smaller population sizes, recombinations may be expected further away from the gene, so more distal flanking markers would be required to detect the recombination.

[0084] The availability of integrated linkage maps of the soybean genome containing increasing densities of public soybean markers has facilitated soybean genetic mapping and MAS.

[0085] Of all the molecular marker types, SNPs are the most abundant and have the potential to provide the highest genetic map resolution. Bhattramakki et al., Plant Molec. Biol. 48:539 (2002). SNPs can be assayed in a so-called “ultra-high-throughput” fashion because they do not require large amounts of nucleic acid and automation of the assay is straight-forward. SNPs also have the benefit of being relatively low-cost systems. These three factors together make SNPs highly attractive for use in MAS. Several methods are available for SNP genotyping, including but not limited to, hybridization, primer extension, oligonucleotide ligation, nuclease cleavage, minisequencing and coded spheres. Such methods have been reviewed in various publications: Gut, Hum. Mutat. 17:475 (2001); Shi, Clin. Chem. 47:164 (2001); Kwok, Pharmacogenomics 1:95 (2000); Bhattramakki and Rafalski, Discovery and application of single nucleotide polymorphism markers in plants, in PLANT GENOTYPING: THE DNA FINGERPRINTING OF PLANTS, CABI Publishing, Wallingford (2001). A wide range of commercially available technologies utilize these and other methods to interrogate SNPs, including Masscode™ (Qiagen, Germantown, Md.), Invader® (Hologic, Madison, Wis.), SnapShot® (Applied Biosystems, Foster City, Calif.), Taqman® (Applied Biosystems, Foster City, Calif.) and Beadarrays™ (Illumina, San Diego, Calif.).

[0086] A number of SNP alleles together within a sequence, or across linked sequences, can be used to describe a haplotype for any particular genotype. Ching et al., BMC Genet. 3:19 (2002); Gupta et al., (2001), Rafalski, Plant Sci. 162:329 (2002b). Haplotypes can be more informative than single SNPs and can be more descriptive of any particular genotype. For example, a single SNP may be allele “T” for a specific Disease resistant line or variety, but the allele “T” might also occur in the soybean breeding population being utilized for recurrent parents. In this case, a combination of alleles at linked SNPs may be more informative. Once a unique haplotype has been assigned to a donor chromosomal region, that haplotype can be used in that population or any subset thereof to determine whether an individual has a particular gene. The use of automated high throughput marker detection platforms known to those of ordinary skill in the art makes this process highly efficient and effective.

[0087] The markers of the present invention can be used in marker-assisted selection protocols to identify and/or select progeny with enhanced Asian soybean rust resistance. Such methods can comprise, consist essentially of or consist of crossing a first soybean plant or germplasm with a second soybean plant or germplasm, wherein the first soybean plant or germplasm comprises a chromosomal interval derived from PI441001, PI441008, PI446958, PI509501, PI583970, or PI483224 wherein said chromosomal interval corresponds with nucleotide base 1 to nucleotide base pair 2161011 of SEQ ID NO: 1 or wherein the chromosomal interval corresponds with nucleotide base 1 to nucleotide base 1300971 of SEQ ID NO: 2 or wherein the chromosomal interval corresponds with nucleotide base 1 to nucleotide base 544693 of SEQ ID NO: 3, and selecting a progeny plant that possesses the marker. Either of the first and second soybean plants, or both, may be of a non-naturally occurring variety of soybean. In some embodiments, the second soybean plant or germplasm is of an elite variety of soybean. In some embodiments, the genome of the second soybean plant or germplasm is at least about 50%, 55%, 60%, 65%, 70%, 75%, 80%, 85%, 90%, 95%, 97%, 99% or 100% identical to that of an elite variety of soybean. In another embodiment, the first soybean plant comprises a chromosomal interval derived from PI441001, PI441008, PI446958, PI509501, PI583970, PI499939 or PI483224 wherein said chromosomal interval corresponds with nucleotide base 1 to nucleotide base pair 2161011 of SEQ ID NO: 1 or wherein the chromosomal interval corresponds with nucleotide base 1 to nucleotide base 1300971 of SEQ ID NO: 2 or wherein the chromosomal interval corresponds with nucleotide base 1 to nucleotide base 544693 of SEQ ID NO: 3 wherein the chromosome interval further comprises at least one allele as depicted in any of Tables 1-3

[0088] Methods for identifying and/or selecting a disease resistant soybean plant or germplasm may comprise, consist essentially of or consist of detecting the presence of a marker associated with enhanced ASR tolerance. The marker may be detected in any sample taken from the plant or germplasm, including, but not limited to, the whole plant or germplasm, a portion of said plant or germplasm (e.g., a seed chip, a leaf punch disk or a cell from said plant or germplasm) or a nucleotide sequence from said plant or germplasm. Such a sample may be taken from the plant or germplasm using any present or future method known in the art, including, but not limited to, automated methods of removing a portion of endosperm with a sharp blade, drilling a small hole in the seed and collecting the resultant powder, cutting the seed with a laser and punching a leaf disk. The soybean plant may be of a non-naturally occurring variety of soybean. In some embodiments, the genome of the soybean plant or germplasm is at least about 50%, 55%, 60%, 65%, 70%, 75%, 80%, 85%, 90%, 95%, 97%, 99% or 100% identical to that of an elite variety of soybean.

[0089] In some embodiments, the marker detected in the sample may comprise, consist essentially of or consist of one or more marker alleles located within a chromosomal interval selected from the group consisting of:
[0090] 1) chromosomal interval derived from PI441001, PI441008, PI446958, PI509501, PI583970, PI499939 or PI483224 wherein said chromosomal interval corresponds with nucleotide base 1 to nucleotide base 2161011 of SEQ ID NO: 1; or
[0091] 2) chromosomal interval derived from PI441001, PI441008, PI446958, PI509501, PI583970, PI499939 or PI483224 wherein said chromosomal interval corresponds with nucleotide base 1 to nucleotide base 1300971 of SEQ ID NO: 2.; or
[0092] 3) chromosomal interval derived from PI441001, PI441008, PI446958, PI509501, PI583970, PI499939 or PI483224 wherein said chromosomal interval corresponds with nucleotide base 1 to nucleotide base 544693 of SEQ ID NO: 3; or
[0093] 4) A chromosomal interval spanning 20 cM, 15 cM, 10 cM, 5 cM, 1 cM, 0.5 cM from a SNP marker that associates with increased ASR resistance in soybean wherein the SNP marker is selected from the group consisting of any favorable SNP marker displayed in Tables 1-3.

[0094] Methods for producing an disease resistant soybean plant may comprise, consist essentially of or consist of detecting, in a germplasm, a marker associated with enhanced disease resistance (e.g. ASR) wherein said marker is selected from Tables 1-3 or wherein marker is a closely linked loci of any marker described in any one of Tables 1-3 and producing a soybean plant from said germplasm. The marker may be detected in any sample taken from the germplasm, including, but not limited to, a portion of said germplasm (e.g., a seed chip or a cell from said germplasm) or a nucleotide sequence from said germplasm. Such a sample may be taken from the germplasm using any present or future method known in the art, including, but not limited to, automated methods of removing a portion of endosperm with a sharp blade, drilling a small hole in the seed and collecting the resultant powder, cutting the seed with a laser and punching a leaf disk. The germplasm may be of a non-naturally occurring variety of soybean. In some embodiments, the genome of the germplasm is at least about 50%, 55%, 60%, 65%, 70%, 75%, 80%, 85%, 90%, 95%, 97%, 99% or 100% identical to that of an elite variety of soybean. A disease resistant soybean plant is then produced from the germplasm identified as having the marker associated with enhanced disease resistance (e.g. ASR) according to methods well known in the art for breeding and producing plants from germplasm.

[0095] In some embodiments, the marker detected in the germplasm may comprise, consist essentially of or consist of one or more marker alleles located within a chromosomal interval selected from the group consisting of:
[0096] 1) a chromosomal interval derived from PI441001, PI441008, PI446958, PI509501, PI583970, PI499939 or PI483224 wherein said chromosomal interval corresponds with nucleotide base 1 to nucleotide base 2161011 of SEQ ID NO: 1; or
[0097] 2) a chromosomal interval derived from PI441001, PI441008, PI446958, PI509501, PI583970, PI499939 or PI483224 wherein said chromosomal interval corresponds with nucleotide base 1 to nucleotide base 1300971 of SEQ ID NO: 2.; or
[0098] 3) a chromosomal interval derived from PI441001, PI441008, PI446958, PI509501, PI583970, PI499939 or PI483224 wherein said chromosomal interval corresponds with nucleotide base 1 to nucleotide base 544693 of SEQ ID NO: 3; or
[0099] 4) a chromosomal interval spanning 20 cM, 15 cM, 10 cM, 5 cM, 1 cM, 0.5 cM from a SNP marker that associates with increased ASR resistance in soybean wherein the SNP marker is selected from the group consisting of any favorable SNP marker displayed in Tables 1-3.

[0100] In some embodiments, the marker detected in the germplasm may comprise, consist essentially of or consist of one or more marker alleles selected from any of Tables 1-3.

[0101] Methods for producing and/or selecting an Asian soy rust resistant/tolerant soybean plant or germplasm may comprise crossing a first soybean plant or germplasm with a second soybean plant or germplasm, wherein said first soybean plant or germplasm comprises a chromosomal interval selected from the group consisting of:
[0102] 1) chromosomal interval derived from PI441001, PI441008, PI446958, PI509501, PI583970, PI499939 or PI483224 wherein said chromosomal interval corresponds with nucleotide base 1 to nucleotide base 2161011 of SEQ ID NO: 1; or
[0103] 2) chromosomal interval derived from PI441001, PI441008, PI446958, PI509501, PI583970, PI499939 or PI483224 wherein said chromosomal interval corresponds with nucleotide base 1 to nucleotide base 1300971 of SEQ ID NO: 2.; or
[0104] 3) chromosomal interval derived from PI441001, PI441008, PI446958, PI509501, PI583970, PI499939 or PI483224 wherein said chromosomal interval corresponds with nucleotide base 1 to nucleotide base 544693 of SEQ ID NO: 3; or
[0105] 4) A chromosomal interval spanning 20 cM, 15 cM, 10 cM, 5 cM, 1 cM, 0.5 cM from a SNP marker that associates with increased ASR resistance in soybean wherein the SNP marker is selected from the group consisting of any favorable SNP marker displayed in Tables 1-3.
[0106] 5) A chromosomal interval spanning 20 cM, 15 cM, 10 cM, 5 cM, 1 cM, 0.5 cM from a SNP marker that associates with increased ASR resistance in soybean wherein the SNP marker is selected from the group consisting of any SNP marker displayed in Tables 1-3; and crossing with a second soybean plant not comprising the chromosome interval then producing a progeny plant with increased ASR resistance. Either the first or second soybean plant or germplasm, or both, may be of a non-naturally occurring variety of soybean. In some embodiments, the second soybean plant or germplasm is of an elite variety of soybean. In some embodiments, the genome of the second soybean plant or germplasm is at least about 50%, 55%, 60%, 65%, 70%, 75%, 80%, 85%, 90%, 95%, 97%, 99% or 100% identical to that of an elite variety of soybean.

[0107] Also provided herein is a method of introgressing an allele associated with enhanced Disease (e.g. ASR, SCN, SDS, RKN, Phytopthora, etc.) resistance/tolerance into a soybean plant. Such methods for introgressing an allele associated with enhanced Disease (e.g. ASR, SCN, SDS, RKN, Phytopthora, etc.) resistance/tolerance into a soybean plant or germplasm may comprise, consist essentially of or consist of crossing a first soybean plant or germplasm comprising said allele (the donor) wherein said allele is selected from any allele listed in Table 1 Table 2, Table 3 or a maker in “close proximity” to a marker listed in Tables 1-3 with a second soybean plant or germplasm that lacks said allele (the recurrent parent) and repeatedly backcrossing progeny comprising said allele with the recurrent parent. Progeny comprising said allele may be identified by detecting, in their genomes, the presence of a marker associated with enhanced Disease (e.g. ASR, SCN, SDS, RKN, Phytopthora, etc.) resistance/tolerance. The marker may be detected in any sample taken from the progeny, including, but not limited to, a portion of said progeny (e.g., a seed chip, a leaf punch disk or a cell from said plant or germplasm) or a nucleotide sequence from said progeny. Such a sample may be taken from the progeny using any present or future method known in the art, including, but not limited to, automated methods of removing a portion of endosperm with a sharp blade, drilling a small hole in the seed and collecting the resultant powder, cutting the seed with a laser and punching a leaf disk. Either the donor or the recurrent parent, or both, may be of a non-naturally occurring variety of soybean. In some embodiments, the recurrent parent is of an elite variety of soybean. In some embodiments, the genome of the recurrent parent is at least about 50%, 55%, 60%, 65%, 70%, 75%, 80%, 85%, 90%, 95%, 97%, 99% or 100% identical to that of an elite variety of soybean.

[0108] In some embodiments, the marker used to identify progeny comprising an allele associated with enhanced Disease (e.g. ASR, SCN, SDS, RKN, Phytopthora, etc.) resistance/tolerance may comprise, consist essentially of or consist of one or more marker alleles located within a chromosomal interval selected from the group consisting of:
[0109] 1) chromosomal interval derived from PI441001, PI441008, PI446958, PI509501, PI583970, PI499939 or PI483224 wherein said chromosomal interval corresponds with nucleotide base 1 to nucleotide base 2161011 of SEQ ID NO: 1; or
[0110] 2) chromosomal interval derived from PI441001, PI441008, PI446958, PI509501, PI583970, PI499939 or PI483224 wherein said chromosomal interval corresponds with nucleotide base 1 to nucleotide base 1300971 of SEQ ID NO: 2.; or
[0111] 3) chromosomal interval derived from PI441001, PI441008, PI446958, PI509501, PI583970, PI499939 or PI483224 wherein said chromosomal interval corresponds with nucleotide base 1 to nucleotide base 544693 of SEQ ID NO: 3; or
[0112] 4) A chromosomal interval spanning 20 cM, 15 cM, 10 cM, 5 cM, 1 cM, 0.5 cM from a SNP marker that associates with increased ASR resistance in soybean wherein the SNP marker is selected from the group consisting of any favorable SNP marker displayed in Tables 1-3; or
[0113] 5) a chromosomal interval spanning 20 cM, 15 cM, 10 cM, 5 cM, 1 cM, 0.5 cM from a SNP marker that associates with increased ASR resistance in soybean wherein the SNP marker is selected from the group consisting of any SNP marker displayed in Tables 1-3 or any closely linked markers in close proximity to said intervals 1-3.

[0114] In some embodiments, the marker may comprise, consist essentially of or consist of marker alleles located in at least two different chromosomal intervals. For example, the marker may comprise one or more alleles located in the chromosomal interval defined by and including any two markers in Table 1, any two markers located in Table 2 or any two markers in Table 3.

[0115] The following are exemplary embodiments contemplated and encompassed within the invention:
[0116] 1. An elite Glycine max plant having in its genome a chromosomal comprising any one of SEQ ID NOs: 1-3 or a portion of any thereof that confers ASR resistance in said plant; in some instances, the interval will be previously derived from a wild Glycine plant, e.g. Glycine tomentella and in further instances the wild Glycine plant is selected from any one of plant accessions PI441001, PI499939 PI441008, PI446958, PI509501, PI583970, or PI483224, wherein said chromosomal interval confers increased Asian soy rust (ASR) resistance as compared to a control plant not comprising said chromosomal interval; Further in one example, an elite Glycine max plant is produced by a) performing a non-natural cross between a Glycine max plant and a Glycine tomentella plant wherein “non-natural cross” means a cross between two species that will not produce viable offspring without further intervention (e.g. embryo rescue such as described in Example 3) such as; a) performing embryo rescue as essentially described in Example 3 to create a amphidiploid plant; b) backcrossing the amphidiploid plant of b) with a Glycine max plant for at least 1 backcross generation (preferably BC4) resulting in the generation of an elite Glycine max plant having introgressed in its genome said chromosome interval(s); further the said elite Glycine max plant may have 20 chromosome pairs or could maintain a chromosome pair from Glycine tomentella and inheriting said intervals to confer ASR resistance in said elite Glycine max plant.
[0117] 2. The plant of embodiment 1, wherein the chromosomal interval comprises SEQ ID NOs: 1, 2, 3 or a portion of any thereof wherein said portion confers ASR resistance to elite Glycine max plant.
[0118] 3. The plant of embodiments 1-2, wherein the chromosomal interval comprises a SNP marker associated with increased ASR resistance wherein said SNP marker corresponds with any one of the favorable SNP markers as listed in Tables 1-3; or in another variation a haplotype comprising at least 2 SNP markers associated with ASR resistance and further wherein the at least 2 SNP markers are selected from any favorable SNP markers as listed in Tables 1-3.
[0119] 4. The plant of embodiments 1-3, wherein the chromosomal interval is derived from Glycine tomentella chromosome 20.
[0120] 5. The plant of embodiments 1-4, wherein the chromosomal interval corresponds to a position within the wild Glycine and/or Glycine tomentella genome that comprises SEQ ID NOs: 1-3 or a portion thereof wherein said portion confers increased ASR resistance in said elite Glycine max plant.
[0121] 6. The plant of embodiments 1-5, wherein the elite Glycine max plant further shows resistance to any one of the stresses selected from: diseases (such as powdery mildew, Pythium ultimum, Phytophthora root rot, leaf spot, blast, brown spot, root-knot nematode, soybean cyst nematode, soybean vein necrosis virus, soybean stem canker, soybean sudden death syndrome, leaf and neck blast, rust, frogeye leaf spot, brown stem rot, Fusarium, or sheath blight); insect pests (such as whitefly, aphid, grey field slug, sugarcane borer, green bug, or aphid); abiotic stress (such as drought tolerance, flooding, high level of salinity, heavy metal, aluminum, manganese, cadmium, zinc, UV-B, boron, iron deficiency chlorosis or cold tolerance (i.e. extreme temperatures)) and further wherein said resistance to stress is conferred from said chromosomal interval.
[0122] 7. The plant of embodiments 1-6, wherein at least one parental line of said plant was selected or identified through molecular marker selection, wherein said parental line is selected or identified based on a molecular marker located within or closely associated with said chromosome interval corresponding to any one of SEQ ID NOs: 1-3.
[0123] 8. The plant of embodiment 7, wherein the molecular marker is a single nucleotide polymorphism (SNP), a quantitative trait locus (QTL), a amplified fragment length polymorphism (AFLP), randomly amplified polymorphic DNA (RAPD), a restriction fragment length polymorphism (RFLP) or a microsatellite.
[0124] 9. The plant of embodiments 7-8, wherein the molecular marker is a SNP marker and the molecular marker is any favorable marker as shown in Tables 1-3.
[0125] 10. The plant of any of embodiments 1-9, wherein the plant is a agronomically elite Glycine max plant having a commercially significant yield as well as commercially susceptible: vigor, seed set, standability or threshability.
[0126] 11. The plant of any of embodiments 1-10, wherein said interval is introduced into said plant genome by a “non-natural” wide cross between a Glycine max and Glycine tomentella line followed by subsequent embryo rescue (e.g. as described in Example 3) and then resultant plant backcrossed at least once and more preferably at least four backcrosses (BC4) with Glycine max line (i.e. in some instances a recurrent Glycine max line) to produce an elite or agronomically elite Glycine max line.
[0127] 12. The plant of any of embodiments 1-10, wherein said interval is introduced into said plant genome by transgenic expression or genome editing of sequences corresponding to and comprising any one of SEQ ID NOS: 1-3 or a portion thereof wherein said portion retains ASR resistance when introduced into a susceptible line.
[0128] 13. The plant of embodiment 12, wherein the interval is introduced by genome editing of a Glycine max genomic region homologous to, or a ortholog of any of the intervals corresponding to SEQ ID NOs: 1-3 and further making at least one genetic edit to said Glycine max genomic region to include at least 1 allele change corresponding to any favorable allele as described in any of Tables 1-3 wherein said Glycine max genomic region did not comprise said allele change before genome edit and said genome edit confers in plant increased ASR resistance as compared to a control plant.
[0129] 14. The plant of embodiment 13, wherein the genetic edit is accomplished through CRISPR, TALEN, meganucleases or through modification of genomic nucleic acids.
[0130] 15. The plant of embodiments 1-14 wherein the chromosomal interval comprises any one of or a portion thereof (where said portion retains ASR resistance) of nucleotide base pair positions: 1-2161011 of SEQ ID NO: 1; 1-1300971 of SEQ ID NO: 2; or 1-544693 of SEQ ID NO: 3.
[0131] 16. A ASR resistant agronomically elite Glycine max plant having commercially significant yield, wherein said plant comprises an introgression of a chromosomal interval from a wild Glycine plant wherein said chromosome interval corresponds to and/or comprises any one of SEQ ID NOs: 1-3; in some instances said wild Glycine plant is Glycine tomentella, in further instances the wild Glycine plant is any one of accessions PI441001, PI441008, PI446958, PI499939, PI509501, PI583970, PI483224 or progeny thereof, wherein the introgression comprises a ASR resistance conferring QTL linked to at least one marker located on the chromosome equivalent to Glycine tomentella chromosome 20.
[0132] 17. The ASR resistant elite Glycine max plant of embodiment 16, wherein said QTL is homozygous.
[0133] 18. The plant of embodiments 16-17, wherein the parental plant of said ASR resistant agronomically elite Glycine max plant is a wide cross between Glycine max and Glycine tomentella parental lines; in one variation the parental line is a amphidiploid hybrid between Glycine max and Glycine tomentella parental lines (herein, “amphidiploid hybrid”).
[0134] 19. An agronomically elite Glycine max plant having commercially significant yield comprising an ASR resistant allele which confers increased resistance to ASR, and wherein the ASR allele comprises at least one single nucleotide polymorphism (SNP) selected from the group of favorable SNPs described in any one of Tables 1-3 and further wherein said plant comprises in its genome a chromosomal interval (i.e. such as any one of SEQ ID NOs: 1-3) from Glycine tomentella or a progeny there of (e.g. a amphidiploid hybrid).
[0135] 20. An agronomically elite soybean having commercially significant yield comprising a chromosomal interval from Glycine tomentella chromosome 20 comprising at least one favorable SNP marker selected from any one of Tables 1-3; in one variation the chromosome interval is any one of SEQ ID NOs: 1-3.
[0136] 21. The plant of embodiment 20, wherein said chromosomal interval from Glycine tomentella chromosome 5 is derived from any one of plant accessions PI441001, PI441008, PI446958, PI509501, PI583970, PI499939, PI483224 or progeny thereof (e.g. such as a amphidiploid hybrid).
[0137] 22. The plant of embodiments 20-21, wherein the chromosomal interval comprises SEQ ID NO: 1, SEQ ID NO: 2, SEQ ID NO: 3 or a portion thereof wherein said chromosomal interval confers increased ASR resistance in said plant as compared to a control plant not comprising said chromosomal interval.
[0138] 23. A plant cell or plant part derived from the plant or seed of embodiments 1-22; in some instances the plant cell or plant part cannot be used to regenerate a plant (e.g. thus a plant cell or plant part unable to be used to regenerate a plant from the plant or seed of embodiments 1-22).
[0139] 24. A progeny plant or seed from any of the plants of embodiments 1-22.
[0140] 25. A Glycine max plant of embodiments 1-22, wherein said plant has 20 chromosome pairs and/or 40 paired chromosomes or in some instances said plant maintains a chromosomal pair derived from a wild glycine line.
[0141] 26. A Glycine max plant of embodiments 1-25, wherein there is no yield drag or negative agronomic effects as compared to a control plant.
[0142] 27. A method of producing a soybean plant (in some instances a “amphidiploid hybrid”) having increased resistance to Asian soybean rust (ASR), the method comprising the steps of:
   [0143] a. crossing a Glycine max plant with a ASR resistant wild Glycine plant, in some instances a Glycine tomentella plant;
   [0144] b. generating soybean pods from the cross of a);
   [0145] c. isolating embryos from the pods of b) and placing said embryos onto embryo rescue medium (in some instances the embryo rescue medium comprises or has a composition essentially equivalent to: 3.1 g B5 basal salt, Gamborg's, 1 ml B5 vitamins 1000×, 40 g sucrose [C12H22O11], 0.25 g casein hydrolysate, 0.25 mg BAP, 0.75 g MgCl2*6H20, 20 ml glutamine 25 mg/ml, 0.1 g serine [C3H7NO3], 4 ml Asparagine 25 mg/ml, 0.05 ml of IBA 1 mg/ml, and 2.0 g Gelzan); or Murashige and Skoog Medium (MS) or Gamborg's B-5 media (Bridgen, 1994)) wherein there is no callus induction caused or initiated in this step c);
   [0146] d. transferring the embryos of c) onto germination medium or elongation medium (in some instances the germination medium comprises or has a composition essentially equivalent to: 3.2 g Schenk and Hilderbrandt Basal salt mixture, 1 g Myo-inositol [C6H12O6], 5 ml Thiamine 1 mg/ml, 0.5 ml pyridoxine 1 mg/ml, 10 g sucrose [C12H22O11], and 7.5 g purified agar) or elongation medium comprising or has a composition essentially equivalent to: 4.3 g MS Basal salt Mixture [MSP01], 5 ml MS iron 200×, 30 g Sucrose [C12H22O11], 1 g MES [C6H13NO4S], 8 g purified agar, 1 ml B5 vitamins 100×, 2 ml glutamine 25 mg/ml, 0.50 ml zeatin riboside, trans isomers 1 mg/ml, 0.1 ml IAA 1 mg/ml, 0.2 ml GA3); and collecting shoots from said embryos;
   [0147] e. growing the collected shoots of d) on germination or elongation medium; and
   [0148] f. transferring established shoots of e) to soil, thereby producing a soybean plant having increased resistance to ASR (in a preferred instance the shoots are rooted on elongation or germination medium to form plantlets and subsequently hardened.)
[0149] 28. The method of embodiment 27, wherein the wild Glycine plant or Glycine tomentella plant of step a) comprises in its genome a chromosomal interval corresponding to and defined by (herein, “a chromosomal defined by” means the interval is the span of nucleotide bases from the first nucleotide to final nucleotide of the respective SEQ ID NO:) any one of SEQ ID NOs: 1-3 or a portion thereof where said portion confers increased ASR resistance in a plant.
[0150] 29. The method of embodiments 27-28, wherein the Glycine tomentella plant comprises in its genome an allele associated with ASR resistance wherein said allele corresponds to any of the favorable alleles listed in Tables 1-3 or is a allele or SNP within any one of chromosome intervals comprising any one of SEQ ID NOs: 1-3 wherein said allele or SNP is associated with or closely linked to ASR resistance in a plant.
[0151] 30. The method of embodiments 27-29, wherein the wild Glycine or Glycine tomentella plant is any one of PI441001, PI441008, PI499939, PI446958, PI509501, PI583970, PI483224 or progeny thereof (in some instances the progeny is a amphidiploid hybrid).
[0152] 31. The method of embodiment 30, wherein the progeny plant is a wide cross between Glycine max and Glycine tomentella parental lines.
[0153] 32. The method of embodiments 27-31, further comprising the step of molecular marker selection where an isolated genomic nucleic acid from any one of: the parent plants of a), the embryo of c) or the shoot or resultant plant of f) is isolated and analyzed (e.g. genotyped) for the presence of a allele that associates with increased ASR resistance and further wherein said allele is closely linked with the chromosome intervals corresponding to and defined by SEQ ID NOs: 1-3 (e.g. any of the favorable alleles as described in any one of Tables 1-3).
[0154] 33. The method of embodiment 32, wherein the allele corresponds to any of the favorable alleles listed in Tables 1-3.
[0155] 34. The method of embodiments 27-33, wherein the Glycine max plant of a) has a relative maturity of 3.7 to 4.8. or in other variations the Glycine max plant may be selected from soybean maturity groups 000 the X
[0156] 35. The method of embodiments 27-34, wherein the Glycine max plant of a) is used as a female plant and said wild Glycine or Glycine tomentella plant is the pollen donor; alternatively in some instances the Glycine max plant of a) can be uses as the male pollen donor plant and Wild Glycine or Glycine tomentella plant is used as a female plant.
[0157] 36. The method of embodiments 27-35, wherein the pods of b) are treated with a hormone mixture comprising GA3, NAA and Kinetin (in some embodiments 100 mg GA3, 25 mg NAA and 5 mg kinetin/L and further, in some instances, wherein said hormone treatment is sprayed on pods daily until harvest).
[0158] 37. The method of embodiments 27-36, wherein the pods are collected prior to 19 days after pollination.
[0159] 38. The method of embodiments 27-37, wherein the embryos and/or shoots are treated with a chromosome doubling agent in any one of steps e)-h) to create amphidiploid plants (or amphidiploid hybrid) capable of being backcrossed with a domestic annual Glycine cultivar to produce at least one backcross generation in some instances a BC4 generation, further wherein the amphidiploid plant further comprises in its genome a favorable agronomic trait, such as ASR resistance that was inherited from the wild Glycine or Glycine tomentella parent; in other instances the amphidiploid plants are backcrossed with a recurrent Glycine max parental line followed by embryo rescue (e.g. as described in embodiments 65-83) to create a BC1 and repeated multiple times to produce a BC4 generation wherein said BC4 generation is fertile (i.e. no need for embryo rescue to generate plants) and capable of producing ASR resistant Glycine max progeny plants.
[0160] 39. The method of embodiment 38, wherein the chromosome doubling agent is either colchicine or trifluralin; further contemplated chromosome doubling agents that may be used in embodiment 38 may comprise oryzalin.
[0161] 40. The method of embodiments 27-39, wherein the embryos of c) remains on embryo rescue medium for at least about 20 days at about 24° C.
[0162] 41. The method of embodiments 27-39, wherein the embryos of d) remain on germination or elongation medium for at least about 20 days at about 24° C.
[0163] 42. The method of embodiment 41, wherein the embryo rescue medium is Soy ER1-1 wherein Soy ER1-1 comprises the following: 3.1 g B5 basal salt, Gamborg's, 1 ml B5 vitamins 1000×, 40 g sucrose [C12H22O11], 0.25 g casein hydrolysate, 0.25 ml BAP, 0.75 g MgCl2*6H20, 20 ml glutamine 25 mg/ml, 0.1 g serine [C3H7NO3], 4 ml Asparagine 25 mg/ml and 0.05 ml of IBA 1 mg/ml (herein, “Soy ER1-1”).
[0164] 43. A method of producing a Glycine max plant having increased resistance to Asian soybean rust (ASR), the method comprising the steps of:
   [0165] a. providing a first Glycine max plant comprising in its genome a chromosomal interval corresponding to any one of SEQ ID NOs: 1-3 wherein said first Glycine max plant has increased resistance to ASR;
   [0166] b. crossing the Glycine max plant of a) with a second Glycine max plant not comprising said chromosomal interval;
   [0167] c. (in some embodiments this step is omitted) selecting a progeny plant from the cross of b) by isolating a nucleic acid from said progeny plant and detecting within said nucleic acid an allele that associates with increased ASR resistance and further wherein said allele is closely linked with the chromosome intervals corresponding to SEQ ID NOs: 1-3,
   [0168] d. thereby, producing a Glycine max plant having increased resistance to ASR.
[0169] 44. The method of embodiment 43, wherein the allele in c) corresponds to any of the favorable alleles as depicted in any one of Tables 1-3.
[0170] 45. The method of embodiments 43-44, wherein either first or second Glycine max plant is an elite Glycine max plant; further the first or second Glycine max plant could also be an elite Glycine max plant having commercially significant yield and in further embodiments be a agronomically elite Glycine max plant.
[0171] 46. The method of embodiments 43-45, wherein the progeny plant is backcrossed by one or more generations, in some instances at least four (BC4) backcrosses; in further instances the BC1, BC2, BC3 generation is followed by embryo rescue as described in Example 3 or in embodiments 65-82 below.
[0172] 47. The method of embodiments 27-46, wherein the chromosome interval corresponds to a Glycine tomentella chromosome interval located on Glycine tomentella chromosome 20 and additionally comprises any one of SEQ ID NOS: 1-3 or a portion thereof wherein said portion confers ASR resistance or is associated with ASR resistance.
[0173] 48. The method of embodiment 47, wherein the Glycine tomentella chromosome interval is derived from any one of plant accessions: PI441001, PI441008, PI446958, PI509501, PI499939, PI583970, PI483224 or a progeny thereof, in some instances the progeny comprises a amphidiploid hybrid plant.
[0174] 49. The method of embodiment 48, wherein the progeny plant is a wide cross between Glycine max and Glycine tomentella parental lines.
[0175] 50. A method of producing a Glycine max plant with increased ASR resistance, the method comprising the steps of:
   [0176] a) isolating a nucleic acid from a Glycine max plant;
   [0177] b) detecting in the nucleic acid of a) at least one molecular marker associated with increased ASR wherein said molecular marker is located within 20 cM, 10 cM, 5 cM, 1 cM 0.5 cM, or closely linked with a chromosomal interval corresponding to a genomic region from a wild Glycine plant or Glycine tomentella plant comprising any one of SEQ ID NOs: 1-3, or a portion thereof;
   [0178] c) selecting a plant based on the presence of the molecular marker detected in b) additionally crossing the selected plant with a second plant (e.g. Glycine max plant) not comprising said chromosomal interval; and
   [0179] d) producing a Glycine max progeny plant from the plant of c) identified as having said allele associated with increased ASR resistance and/or crossed with a second plant.
[0180] 51. The method of embodiment 50, wherein the molecular marker is closely linked with or corresponds to any one of the favorable alleles as depicted in Tables 1-3 and/or said molecular marker is within a chromosomal interval from Glycine tomentella corresponding to and/or defined by SEQ ID NOs: 1-3.
[0181] 52. A method of identifying and/or selecting a plant (in some embodiments either a Glycine max or a Glycine tomentella plant) having a ASR resistance, the method comprising the steps of
   [0182] a. isolating a nucleic acid from a soybean plant or plant part;
   [0183] b. detecting in the nucleic acid the presence of a molecular marker that associates with increased ASR resistance wherein the molecular marker is located within 20 cM, 10 cM, 5 cM, 1 cM, 0.5 cM of a marker as described in any one of Tables 1-3 or in another embodiment the molecular marker is closely linked with, in close proximity to, closely associated with or within a chromosomal interval corresponding to and/or comprising any one of SEQ ID NOs: 1-3; and
   [0184] c. identifying or selecting a soybean plant having increased ASR resistance on the basis of the molecular marker detected in b), thereby identifying and/or selecting a plant, having ASR resistance.
[0185] 53. The method of embodiment 52, wherein the molecular marker detected in b) consists of any favorable marker as described in any one of Tables 1-3 or a allele or molecular marker associated with ASR wherein the allele or molecular marker is located within a chromosomal interval comprising and defined by any one of SEQ ID NOs: 1-3.
[0186] 54. The method of embodiments 50-53, wherein the molecular marker is a single nucleotide polymorphism (SNP), a quantitative trait locus (QTL), an amplified fragment length polymorphism (AFLP), randomly amplified polymorphic DNA (RAPD), a restriction fragment length polymorphism (RFLP) or a microsatellite.
[0187] 55. The method of any one of embodiments 50-54, wherein the detecting comprises amplifying a marker locus or a portion of the marker locus and detecting the resulting amplified marker amplicon (in some embodiments the amplicon comprises a nucleotide sequence as shown in any one of SEQ ID NOs 1-3; further, in another embodiment, a primer able to anneal to said marker locus and amplify said locus allowing for the detection of the resulting amplified marker amplicon.)
[0188] 56. The method of embodiment 55, wherein the amplifying comprises: a) admixing an amplification primer or amplification primer pair with a nucleic acid isolated from the first soybean plant or germplasm, wherein the primer or primer pair is complementary or partially complementary to at least a portion of the marker locus, and is capable of initiating DNA polymerization by a DNA polymerase using the soybean nucleic acid as a template; and, b) extending the primer or primer pair in a DNA polymerization reaction comprising a DNA polymerase and a template nucleic acid to generate at least one amplicon; further embodiments, include the primer pair used in said DNA polymerization reaction and/or a composition comprising said primer pair.
[0189] 57. The method of embodiments 32-56, wherein the nucleic acid is selected from DNA or RNA, in some embodiments isolated genomic DNA and/or RNA.
[0190] 58. The method of embodiments 55-57, wherein the amplifying comprises employing a polymerase chain reaction (PCR) or ligase chain reaction (LCR) using a nucleic acid isolated from a soybean plant or germplasm as a template in the PCR or LCR, further embodiments wherein said soybean plant is either Glycine max or Glycine tomentella
[0191] 59. A primer diagnostic for ASR resistance wherein said primer can be used in a PCR reaction to indicate the presence of an allele associated with ASR resistance, wherein said allele is any favorable allele as described in Tables 1-3 and/or said primer comprises a nucleotide sequence including any of SEQ ID NOs: 1-3 wherein primer is used in a PCR reaction to generate a amplicon diagnostic for at least one allele that is associated with ASR resistance; further a composition comprising said primer.
[0192] 60. The method of embodiments 27-58, wherein the plant produced or identified by said methods, further confers increased resistance to any one of soy cyst nematode, bacterial pustule, IDC, root knot nematode, frog eye leaf spot, Phytophthora, brown stem rot, nematode, rust, smut, Golovinomyces cichoracearum, Erysiphe cichoracearum, Blumeria graminis, Podosphaera xanthii, Sphaerotheca fuliginea, Pythium ultimum, Uncinula necator, Mycosphaerella pinodes, Magnaporthe grisea, Bipolaris oryzae, Magnaporthe grisea, Rhizoctonia solani, Phytophthora sojae, Schizaphis graminum, Bemisia tabaci, Rhopalosiphum maidis, Deroceras reticulatum, Diatraea saccharalis, Schizaphis graminum and Myzus persicae; or a combination thereof.
[0193] 61. A plant, seed or plant part produced by the methods of embodiments 27-58 or 60.
[0194] 62. The plant of claim 61, wherein the plant is an elite Glycine max plant, in some embodiments the plant is an elite Glycine max plant having commercially significant yield.
[0195] 63. The plant of embodiment 62, wherein the plant is an agronomically elite Glycine max plant and in some instances the agronomically elite Glycine max plant shows commercially significant yield.
[0196] 64. The plant of embodiments 61-63, wherein said plant displays no yield drag or negative agronomic effects as compared to a control and/or check plant; or in other instances has susceptible commercial performance as compared to a commercial check.
[0197] 65. A method for producing at least one hybrid between a first parent plant of a wild perennial Glycine species and a second parent plant that is a domestic annual Glycine cultivar, wherein said Glycine cultivar is capable of being backcrossed with a domestic annual Glycine cultivar to produce at least one plant of a first backcross generation, or fertile progeny thereof, said method comprising the steps of:
   [0198] a. providing at least one wild glycine plant (wg) and at least one domestic annual Glycine parental plant (dg);
   [0199] b. allowing parental plants to flower;
   [0200] c. crossing said wg plant with dg plant (In most embodiments this cross is a “non-natural cross” thus not able to produce viable/fertile offspring);
   [0201] d. generating pods from the cross of c);
   [0202] e. isolating embryos from the pods of d) and placing said embryos onto embryo rescue medium, wherein there is no callus induction;
   [0203] f. transferring the embryos of e) onto germination medium or elongation medium and collecting shoots from said embryos;
   [0204] g. growing the collected shoots of f) on germination or elongation medium; and
   [0205] h. transferring established shoots of e) to soil, thereby producing a hybrid between a first parent plant of a wild perennial Glycine species and a second parent plant that is a domestic annual Glycine; in some embodiments this hybrid is a amphidiploid hybrid capable of being backcrossed with a Glycine max plant for at least 1 generation.
[0206] 66. The method of embodiment 65 wherein said wild Glycine line is selected from the group consisting of G. canescens, G. argyrea, G. clandestine, G. latrobeana, G. albicans, G. aphyonota, G. arenaria, G. curvata, G. cyrtoloba, G. dolichocarpa, G. falcate, G. gracei, G. hirticaulis, G. lactovirens, G. latifolia, G. microphylla, G. montis-douglas, G. peratosa, G. pescadrensis, G. pindanica, G. pullenii, G. rubiginosa, G. stenophita, G. syndetika, and G. tomentella.
[0207] 67. The method of embodiments 65-66, wherein the wild Glycine parental plant is Glycine tomentella.
[0208] 68. The method of embodiments 65-66, wherein the wild perennial Glycine carries a desirable agronomic trait such as disease resistance (e.g. ASR) and/or abiotic stress resistance (e.g. drought resistance) and/or insect resistance (e.g. Aphid resistance) and/or higher yield.
[0209] 69. The method of embodiment 68, wherein the desirable trait is selected from the group consisting of: disease resistance including but not limited to, resistance to: soy cyst nematode, bacterial pustule, root knot nematode, frog eye leaf spot, Phytophthora, brown stem rot, nematode, rust, smut, Golovinomyces cichoracearum, Erysiphe cichoracearum, Blumeria graminis, Podosphaera xanthii, Sphaerotheca fuliginea, Pythium ultimum, Uncinula necator, Mycosphaerella pinodes, Magnaporthe grisea, Bipolaris oryzae, Magnaporthe grisea, Rhizoctonia solani, Phytophthora sojae, Schizaphis graminum, Bemisia tabaci, Rhopalosiphum maidis, Deroceras reticulatum, Diatraea saccharalis, Schizaphis graminum or Myzus persicae; increased yield, increased resistance or tolerance to iron deficiency chlorosis, and increased drought or heat tolerance.
[0210] 70. The method of embodiments 65-69, wherein the domestic annual Glycine is Glycine max.
[0211] 71. The method of embodiments 65-70, wherein the dg plant is used as a female plant and said wg plant is the pollen donor or alternatively the dg plant can be used as a pollen donor (i.e. male line) and wg used as the female line.
[0212] 72. The method of embodiments 65-71, wherein the pods of d) are treated with a hormone mixture comprising GA3, NAA and Kinetin (in some embodiments 100 mg GA3, 25 mg NAA and 5 mg kinetin/L and further, in some instances, wherein said hormone treatment is sprayed on pods daily until harvest.
[0213] 73. The method of embodiments 65-72, wherein the pods are collected prior to 19 days after pollination.
[0214] 74. The method of embodiments 65-73, wherein the embryos and/or shoots are treated with a chromosome doubling agent in any one of steps e)-h) to create amphidiploid plants capable of being backcrossed with a domestic annual Glycine cultivar to produce at least one backcross generation.
[0215] 75. The method of embodiment 74, wherein the chromosome doubling agent is either colchicine, oryzalin or trifluralin.
[0216] 76. The method of embodiments 65-75, wherein the embryos of e) remain on embryo rescue medium for at least about 20 days at about 24° C.
[0217] 77. The method of embodiments 65-76, wherein the embryos of f) remain on germination or elongation medium for at least about 20 days at about 24° C.
[0218] 78. The method of embodiment 76, wherein the embryo rescue medium is Soy ER1-1.
[0219] 79. The method of embodiments 65-78, wherein the cross of c) does not require the emasculation of flowers.
[0220] 80. The method of embodiments 65-79, wherein the cross of c) is a non-natural cross wherein no viable and/or fertile offspring would be produced without further intervention such as, for example, steps d)-h).
[0221] 81. The method of embodiments 65-80, wherein the method further comprises a step i) wherein the hybrid plant of h) is backcrossed at least once with a Glycine max plant in most embodiments the backcross retains a favorable inherited agronomic trait from said wg, for example, the favorable agronomic trait could be disease resistance (e.g. ASR) and/or abiotic stress resistance (e.g. drought resistance) and/or insect resistance (e.g. Aphid resistance) and/or higher yield; In further instances the backcross is carried out for four generations (BC4) resulting in a fertile dg progeny plant comprising said favorable inherited agronomic trait wherein the backcross progression follows a wide cross between wg and dg plant followed by embryo rescue as in embodiment 65 thus generating a backcrossed plant which is repeated for BC2, BC3, and in preferred instances BC4 to produce fertile progeny plants comprising said favorable inherited agronomic trait.
[0222] 82. The method of embodiments 65-81, wherein the method further comprises step j) wherein the hybrid plant of h) is backcrossed multiple times and further wherein each back crossed (BC) generation is selected based on a favorable agronomic trait derived from said wg line; in some instances each backcross is followed by (a-h) for four generations (BC4) thus producing fertile hybrid offspring/progeny plants.
[0223] 83. The method of embodiments 65-82, wherein the method further comprises step k) counting the number of chromosomes in at least one BC generation and selecting those that have 40 paired chromosomes, 20 chromosome pairs or lines not comprising unpaired chromosomes, or in some instances the plant has more than 20 chromosome pairs.
[0224] 84. The method of embodiments 65-82, wherein the method further comprises step k) counting the number of chromosomes in at least one BC generation and selecting for lines that have no unpaired chromosomes and carrying these lines forward for further breeding.
[0225] 85. A amphidiploid plant produced by the method of embodiments 65-85.
[0226] 86. A domestic annual Glycine plant derived from the plant of embodiment 86.
[0227] 87. A domestic annual Glycine plant of embodiment 87, wherein the Glycine plant has inherited a desirable agronomic trait from perennial wild Glycine parent for example, the desirable agronomic trait could be disease resistance (e.g. ASR) and/or abiotic stress resistance (e.g. drought resistance) and/or insect resistance (e.g. Aphid resistance) and/or higher yield.
[0228] 88. The domestic annual Glycine plant of embodiment 88, wherein the desirable agronomic trait is increased disease resistance to any one of: soy cyst nematode, bacterial pustule, root knot nematode, frog eye leaf spot, Phytophthora, brown stem rot, nematode, rust, smut, Golovinomyces cichoracearum, Erysiphe cichoracearum, Blumeria graminis, Podosphaera xanthii, Sphaerotheca fuliginea, Pythium ultimum, Uncinula necator, Mycosphaerella pinodes, Magnaporthe grisea, Bipolaris oryzae, Magnaporthe grisea, Rhizoctonia solani, Phytophthora sojae, Schizaphis graminum, Bemisia tabaci, Rhopalosiphum maidis, Deroceras reticulatum, Diatraea saccharalis, Schizaphis graminum or Myzus persicae.
[0229] 89. The domestic annual Glycine plant of embodiments 88-89, wherein the desirable agronomic traits is better field or commercial performance in regards to any one of the following: increased yield, lodging, plant height, field emergence, resistance or tolerance to herbicides, bacteria, fungi, viruses and nematodes, drought tolerance, heat tolerance, chilling or freezing tolerance, excessing moisture, salt stress, oxidative stress, food content and makeup, physical appearance, male sterility, dry down, standability, prolificacy, sugar properties, biomass, oil quality or production, protein quality and overall quality.
[0230] 90. A plant cell, plant part from any of the plants of embodiments 85-90; in some embodiments said plant cell is incapable of producing a plant.
[0231] 91. A method of controlling ASR in a field comprising the step of planting the seed from any of the plants described in embodiments 1-21; 24-26; 61-64 or 85-89.

### Disease Resistant Soybean Plants and Germplasms

[0232] The present invention provides disease resistant soybean plants and germplasms. In some examples, the disclosure is directed to novel Glycine max plants having in their genome a chromosomal interval chosen from SEQ ID NOs: 1, 2, 3 or a portion of any thereof, wherein the chromosomal interval confers increased Asian soy rust (ASR) resistance as compared to a control plant not comprising the chromosomal interval. As discussed above, the methods of the present invention may be utilized to identify, produce and/or select a disease resistant soybean plant or germplasm (for example a soybean plant resistant or having increased tolerance to Asian Soybean Rust). In addition, to the methods described above, an Disease resistant soybean plant or germplasm may be produced by any method whereby a marker associated with enhanced disease tolerance is introduced into the soybean plant or germplasm, including, but not limited to, transformation, protoplast transformation or fusion, a double haploid technique, embryo rescue, gene editing and/or by any other nucleic acid transfer system.

[0233] In some embodiments, the soybean plant or germplasm comprises a non-naturally occurring variety of soybean. In some embodiments, the soybean plant or germplasm is at least about 50%, 55%, 60%, 65%, 70%, 75%, 80%, 85%, 90%, 95%, 97%, 99% or 100% identical to that of an elite variety of soybean.

[0234] The disease resistant soybean plant or germplasm may be the progeny of a cross between an elite variety of soybean and a variety of soybean that comprises an allele associated with enhanced Disease tolerance (e.g. ASR) wherein the allele is within a chromosomal interval selected from the group consisting of:
[0235] 1) a chromosomal interval derived from PI441001, PI441008, PI446958, PI509501, PI583970, PI499939 or PI483224 wherein said chromosomal interval corresponds with nucleotide base 1 to nucleotide base 2161011 of SEQ ID NO: 1; or
[0236] 2) a chromosomal interval derived from PI441001, PI441008, PI446958, PI509501, PI583970, PI499939 or PI483224 wherein said chromosomal interval corresponds with nucleotide base 1 to nucleotide base 1300971 of SEQ ID NO: 2.; or
[0237] 3) a chromosomal interval derived from PI441001, PI441008, PI446958, PI509501, PI583970, PI499939 or PI483224 wherein said chromosomal interval corresponds with nucleotide base 1 to nucleotide base 544693 of SEQ ID NO: 3; or
[0238] 4) a chromosomal interval spanning 20 cM, 15 cM, 10 cM, 5 cM, 1 cM, 0.5 cM from a SNP marker that associates with increased ASR resistance in soybean wherein the SNP marker is selected from the group consisting of any favorable SNP marker displayed in Tables 1-3

[0239] The disease resistant soybean plant or germplasm may be the progeny of an introgression wherein the recurrent parent is an elite variety of soybean and the donor comprises an allele associated with enhanced disease tolerance and/or resistance wherein the donor carries a chromosomal interval or a portion thereof comprising any one of SEQ ID NOs: 1-3 and wherein the chromosome interval comprises at least one allele selected respectively from Tables 1-3.

[0240] The disease resistant soybean plant or germplasm may be the progeny of a cross between a first elite variety of soybean (e.g., a tester line) and the progeny of a cross between a second elite variety of soybean (e.g., a recurrent parent) and a variety of soybean that comprises an allele associated with enhanced ASR tolerance (e.g., a donor).

[0241] The disease resistant soybean plant or germplasm may be the progeny of a cross between a first elite variety of soybean and the progeny of an introgression wherein the recurrent parent is a second elite variety of soybean and the donor comprises an allele associated with enhanced ASR tolerance.

[0242] A disease resistant soybean plant and germplasm of the present invention may comprise one or more markers of the present invention (e.g. any marker described in Tables 1-3; or any marker in close proximity to any marker as described in Tables 1-3).

[0243] In some embodiments, the disease resistant soybean plant or germplasm may comprise within its genome, a marker associated with enhanced ASR tolerance, wherein said marker is located within a chromosomal interval selected from the group consisting of:
[0244] 1) a chromosomal interval derived from PI441001, PI441008, PI446958, PI509501, PI583970, PI499939 or PI483224 wherein said chromosomal interval corresponds with nucleotide base 1 to nucleotide base 2161011 of SEQ ID NO: 1; or
[0245] 2) a chromosomal interval derived from PI441001, PI441008, PI446958, PI509501, PI583970, PI499939 or PI483224 wherein said chromosomal interval corresponds with nucleotide base 1 to nucleotide base 1300971 of SEQ ID NO: 2.; or
[0246] 3) a chromosomal interval derived from PI441001, PI441008, PI446958, PI509501, PI583970, PI499939 or PI483224 wherein said chromosomal interval corresponds with nucleotide base 1 to nucleotide base 544693 of SEQ ID NO: 3; or
[0247] 4) a chromosomal interval spanning 20 cM, 15 cM, 10 cM, 5 cM, 1 cM, 0.5 cM from a SNP marker that associates with increased ASR resistance in soybean wherein the SNP marker is selected from the group consisting of any favorable SNP marker displayed in Tables 1-3

[0248] In some embodiments, the disease resistant soybean plant or germplasm may comprise within its genome a marker that comprises, consists essentially of or consists of marker alleles located in at least two different chromosomal intervals. For example, the marker may comprise one or more alleles located in the chromosomal interval defined by and including any combination of two markers in Table 1 and one or more alleles located in the chromosomal interval defined by and including any combination of two markers in Table 2.

### Disease Resistant Soybean Seeds

[0249] The present invention provides disease resistant soybean seeds. For example, novel Glycine max seeds having in their genome a chromosomal interval chosen from SEQ ID NOs: 1, 2, 3 or a portion of any thereof, wherein the chromosomal interval confers increased Asian soy rust (ASR) resistance as compared to a control plant not comprising the chromosomal interval. As discussed above, the methods of the present invention may be utilized to identify, produce and/or select a disease resistant soybean seed. In addition to the methods described above, a disease resistant soybean seed may be produced by any method whereby a marker associated with enhanced ASR tolerance is introduced into the soybean seed, including, but not limited to, transformation, protoplast transformation or fusion, a double haploid technique, embryo rescue, genetic editing (e.g. CRISPR or TALEN or MegaNucleases) and/or by any other nucleic acid transfer system.

[0250] In some embodiments, the disease resistant soybean seed comprises a non-naturally occurring variety of soybean. In some embodiments, the soybean seed is at least about 50%, 55%, 60%, 65%, 70%, 75%, 80%, 85%, 90%, 95%, 97%, 99% or 100% identical to that of an elite variety of soybean.

[0251] The disease resistant soybean seed may be produced by a disease resistant soybean plant identified, produced or selected by the methods of the present invention. In some embodiments, the disease resistant soybean seed is produced by a disease resistant soybean or wild glycine plant (e.g. Glycine tomentella) plant comprising any one of chromosomal intervals corresponding to SEQ ID NOs: 1-3, or any portion thereof.

[0252] A disease resistant soybean seed of the present invention may comprise, be selected by or produced by use of one or more markers from Tables 1-3 of the present invention.

[0253] In some embodiments, the disease resistant soybean seed may comprise within its genome, a marker associated with enhanced ASR tolerance, wherein said marker is located within a chromosomal interval selected from the group consisting of:
[0254] 1) a chromosomal interval derived from PI441001, PI441008, PI446958, PI509501, PI583970, PI499939 or PI483224 wherein said chromosomal interval corresponds with nucleotide base 1 to nucleotide base 2161011 of SEQ ID NO: 1; or
[0255] 2) a chromosomal interval derived from PI441001, PI441008, PI446958, PI509501, PI583970, PI499939 or PI483224 wherein said chromosomal interval corresponds with nucleotide base 1 to nucleotide base 1300971 of SEQ ID NO: 2; or
[0256] 3) a chromosomal interval derived from PI441001, PI441008, PI446958, PI509501, PI583970, PI499939 or PI483224 wherein said chromosomal interval corresponds with nucleotide base 1 to nucleotide base 544693 of SEQ ID NO: 3; or
[0257] 4) a chromosomal interval spanning 20 cM, 15 cM, 10 cM, 5 cM, 1 cM, 0.5 cM from a SNP marker that associates with increased ASR resistance in soybean wherein the SNP marker is selected from the group consisting of any favorable SNP marker displayed in Tables 1-3

### EXAMPLES

[0258] The following examples are not intended to be a detailed catalog of all the different ways in which the present invention may be implemented or of all the features that may be added to the present invention. Persons skilled in the art will appreciate that numerous variations and additions to the various embodiments may be made without departing from the present invention. Hence, the following descriptions are intended to illustrate some particular embodiments of the invention, and not to exhaustively specify all permutations, combinations and variations thereof.

### Example 1 Identification of ASR Resistant Wild Glycine Lines

[0259] Multiple wild glycine (Glycine tomentella) lines were evaluated for ASR resistance against sixteen rust strains collected across a diverse range of environments. The rust data were generated using single pustule derived isolates from USDA-ARS (FL Q09, FL Q12, LABR13, FLQ11) and field populations (FL Q15, FLQ16, RTP1, RTP2, Vero, GA15, UBL, BR south and BR central), the screening was carried out in contained facilities. Of the Glycine tomentella lines screened for ASR resistance, the following Glycine tomentella lines showed broad resistance against all ASR strains tested: PI441001, PI441008, PI446958, PI509501, PI583970, and PI483224.

[0260] Each Glycine tomentella line was evaluated over a multiple day course of infection and rated at various time points using a rust rating scale based on groupings modified from Burdon and Speer, T A G, 1984 (see FIG. 6). Each Glycine tomentella accession was screened >2 times with ˜4 plants each time in North & South America using a large diverse panel of rust isolates.

### Example 2 Allele Mining & Associations to PI441001, PI499939, PI441008, PI446958, PI509501, PI583970, or PI483224 ASR Loci

[0261] Resistant parent lines (i.e. PI499939) were crossed with a susceptible Glycine tomentella line and F1 plants were generated. F1 plants were self-fertilized to generate F2 seed. F2 seed was harvested from the selfed F1 plant. F2 seed were shown and leaf tissue from each plant was collected for genotyping studies. Each line was inoculated with Phakopsora pachyrhizi to determine the resistance/susceptible phenotype of each F2 individual. Tissue from resistant F2s and susceptible F2s were combined in separate pools and genomic DNA was prepared from each pool. Illumina sequencing libraries were prepared from DNA for each of the pools and each library was sequenced in two Illumina HiSeq2000 2×100 bp Paired-End (PE) lanes. The average yield per sample was 383 million read pairs, which equals 77 gigabases of sequence per library. The sequencing reads were trimmed to remove bases with PHRED quality scores of <15.

[0262] Quality trimmed reads were aligned to the PI441001 reference genome sequence using GSNAP (WU and NACU 2010) as paired-end fragments. If a pair of reads could not be aligned together, they were treated as singletons for alignment. Reads were used in subsequent analyses if they mapped uniquely to the reference (<2 mismatches every 36 bp and less than 5 bases for every 75 bp as tails).

[0263] SNPs were filtered prior to BSA analysis based on read depth, with SNPs having between 40 and 200x read depth being retained. A Chi-square test was used to select SNPs with significantly different read counts between the two alleles in the two pools. An empirical Bayesian approach (LIU et al. 2012) was used to estimate the conditional probability that there is no recombination between each SNP marker and the causal locus in both the resistant pool and in the susceptible pool. The probability of the linkage between the SNP and the causal gene is the geometric mean of these two conditional probabilities. Multiple SNPs were found to have possible linkage to the target locus. A subset of these putatively linked SNPs were used to fine map the locus using phenotyped F2 individuals. See references: LIU, S., C.-T. YEH, H. M. TANG, D. NETTLETON AND P. S. SCHNABLE, 2012 Gene Mapping via Bulked Segregant RNA-Seq (BSR-Seq). PLoS ONE 7: e36406 & Wu, T. D., and S. Nacu, 2010 Fast and SNP-tolerant detection of complex variants and splicing in short reads. Bioinformatics 26: 873-881.

### Example 3 Embryo Rescue & Introgression of R Gene Intervals into Glycine max Lines

[0264] Embryo rescue is performed (as described below) and chemical treatment to induce chromosome doubling is applied in order to generate amphidiploid shoots. If the amphidiploid plants are fertile they will be used to backcross with Glycine max. Backcrossing with Glycine max and subsequent embryo rescue will need to be performed for several generations in order to gradually eliminate the perennial Glycine tomentella chromosomes eventually resulting in ASR resistant Glycine max plant

[0265] Wide crosses were carried out using Elite Syngenta soybean (Glycine max) lines (RM 3.7 to 4.8). The elite soybean lines are used as the females (pollen recipients) and multiple accessions of Glycine tomentella are used as the males or pollen donors. Selecting flowers from the Glycine tomentella plant containing anthers at the proper developmental stage is important. New, fully-opened, brightly colored flowers hold anthers with mature pollen. The pollen should appear as loose, yellow dust. These flowers are removed from the Glycine tomentella plant and crossed with the elite Glycine max plant for pollination. Pollen from the Glycine tomentella plants should be used within 30 minutes of flower removal. It is also important to identify and select elite soybean flower buds that are ready for pollination. A soybean flower bud is generally ready when it is larger in size when compared to an immature bud. The sepals of the soybean blossoms are lighter in color and the petals are just beginning to appear. First, use a pair of fine-tipped tweezers to carefully detach the sepals from the flower bud to expose the outer set of petals. Then, gently grasp and remove the petals (5 in total) from the flower exposing the ring of stamens surrounding the pistil. Since the stigma is receptive to pollen 1 day before the anthers begin shedding pollen it is important to recognize the stage development of “female ready, male not ready”. When pollinating soybean flowers at this developmental stage it is not necessary to emasculate the female flower. Locate the stigma on the elite soybean flower. Then using 1 male flower, carefully peel off the petals to expose the anthers and gently dust the pollen grains onto the stigma of the soybean flower. Care should be taken not to damage the stigma at any time during this process. Starting the day after pollination a hormone mixture is sprayed onto the pollinated flower and eventual developing F1 pod 1× every day until harvest. The pollinated flower or pod is saturated with a light mist of the hormone mixture, taking care not to cause the flower/pod to prematurely detach from the plant. The mixture contains 100 mg GA3, 25 mg 1-Naphthaleneacetic acid (NAA) and 5 mg kinetin/L distilled water. Application of these hormones aid in the retention of the developing pod and in increased pod growth. The above described wide cross methodology results in success rates significantly higher than that reported in the literature. Further, no emasculation of female flowers is necessary, which saves time and reduces risk of damage to the stigma.

[0266] Harvest: Pods from wide crosses are harvested at approximately 14 to 16 days post pollination. (Harvest dates in the literature suggest 19 to 21 days, however the above method allows for faster harvest time and more robust pods.). Pods are collected and counted according to wide cross combination to determine crossing success. The average crossing success across multiple soybean females and 5 different accessions of Glycine tomentella is approximately 40%. The wide cross pods can contain 1 to 3 seeds but generally 2 seeds are found in each F1 pod. The above described methodology allows for pod harvest at 14 to 16 days after pollination, ˜5 days earlier than described in literature.

[0267] Embryo rescue: Harvested pods are collected and brought back to the lab to be sterilized. The pods are first rinsed with 70% EtOH for 2 to 3 minutes and then placed in 10% Clorox bleach for an additional 30 minutes on a platform shaker at approximately 130 RPM. Finally, the pods are rinsed multiple times with sterile water to remove any residual bleach. Embryo isolation can begin immediately following pod sterilization or pods can be stored at 4° C. for up to 24 hours prior to embryo isolation. The sterilized pods are next taken to a laminar flow hood where the embryos can be rescued. Individual pods are placed in a sterile petri dish and opened using a scalpel and forceps. An incision is made along the length of the wide cross pod away from the seed. The pod can then be easily opened to expose the seed. Alternatively, two pair of forceps can be used to separate the pod shell. Carefully remove the seed from the pod and place in a sterile petri dish under a dissection microscope. Very fine forceps are needed to isolate the embryo from the seed. With forceps in one hand, gently hold the side of the seed away from the embryo, with the hilum facing up. Use another pair of forceps in the other hand to remove the seed coat from the side of the seed containing the embryo. Peel off the membrane surrounding the embryo and push the embryo up from its bottom side. Embryos should be past the globular developmental stage and preferably past the early heart developmental stage (middle to late heart stage, cotyledon stage and early maturation stage embryos are desired). Isolated embryos are transferred to embryo rescue medium such as Soy ER1-1 (i.e. 3.1 g B5 basal salt, Gamborg's, 1 ml B5 vitamins 1000×, 40 g sucrose [C12H22O11], 0.25 g casein hydrolysate, 0.25 ml BAP, 0.75 g MgCl2*6H20, 20 ml glutamine 25 mg/ml, 0.1 g serine [C3H7NO3], 4 ml Asparagine 25 mg/ml and 0.05 ml of IBA 1 mg/ml) Murashige and Skoog Medium (MS) and Gamborg's B-5 media (Bridgen, 1994) may also be used as embryo rescue medium. Embryos can be treated to induce chromosome doubling at this time. (See below for chromosome doubling details.) Isolated embryos remain on embryo rescue medium for 21 to 30 days at 24° C. Embryos may remain in the dark for the entire incubation on ER1-1, they also can be incubated in the dark and later completed in the light, or may spend the entire incubation in the light. There is not a callus induction stage in this protocol, shoots are developed directly from the embryos which allows for faster turnaround time, plantlet survival and better quality results. The above described embryo rescue method involves direct shoot regeneration from embryos, rather than regeneration through embryogenesis, thus making plant recovery quicker (shoot recovery in approximately 2-3 months, compared to reported up to 1 year timeline in the literature). Further, the following protocol does not require culture in the dark following transfer to germination medium nor does the above protocol require a transfer to rooting medium.

[0268] Chromosome doubling treatments: Either colchicine of trifluralin can be used to induce chromosome doubling. Ideally, late heart stage wide cross embryos (or larger) are chemically treated to induce chromosome doubling at any time from immediately following isolation up to 1 week post isolation. The doubling agent can be mixed in either solid or liquid medium and applied for several hours or up to a few days. Trifluralin is used at a concentration of 10-40 uM in either solid or liquid media. Alternatively, colchicine is used at a concentration of 0.4-1 mg/ml in either solid or liquid media. Following chemical treatment, embryos are transferred to fresh embryo rescue medium.

[0269] Shoot regeneration: Developing embryos are transferred from rescue medium to germination medium such as Soy ER GSMv2 (i.e. 3.2 g Schenk and Hilderbrandt Basal salt mixture, 1 g Myo-inositol [C6H12O6], 5 ml Thiamine 1 mg/ml, 0.5 ml pyridoxine 1 mg/ml, 10 g sucrose [C12H22O11], and 7.5 g purified agar) for approximately 3 to 5 weeks in the light at 24° C. Alternatively, developing embryos may be transferred from rescue medium to elongation medium such as Soy E1 0 No TCV (i.e. 4.3 g MS Basal salt Mixture [MSP01], 5 ml MS iron 200×, 30 g Sucrose [C12H22O11], 1 g MES [C6H13NO4S], 8 g purified agar, 1 ml B5 vitamins 100×, 2 ml glutamine 25 mg/ml, 0.50 ml zeatin riboside, trans isomers 1 mg/ml, 0.1 ml IAA 1 mg/ml, 0.2 ml GA3 5 mg/ml, 1.5 ml timentin 100 mg/ml, 0.3 ml cefotaxime 250 mg/ml, 0.5 ml vancomycin 100 mg/ml) Shoots can be kept on medium for approximately 3 to 5 weeks in the light at 24° C. Developing shoots may be transferred from media plates to Phytocons containing either germination or elongation medium for further shoot development. Established shoots having suitable roots are moved to soil.

[0270] Ploidy Analysis: Ploidy analysis is conducted using a flow cytometer. Leaf tissue for ploidy analysis is collected from small shoots either in culture or after establishment in soil. Tissue is collected on dry ice and stored at −80° C. until analysis, or collected on wet ice and analyzed the same day. A sample size of 0.5 cm² is sufficient. Samples are prepared according to the instructions in the Sysmex kit (Sysmex Inc., Kobe Japan). Each sample set contains an untreated F1 plant (not treated to induce chromosome doubling) as a control.

### Example 4 ASR Resistance Trait Introgression

[0271] Amphidiploid lines generated from the wide cross (i.e. Glycine tomentella crossed with Glycine max) followed by embryo rescue as described in Example 3 were backcrossed multiple times with a recurrent elite Glycine max lines. It is known in the art that multiple backcrosses are needed to generate fertile hybrid lines, in particular the literature suggests that a BC3 generation is necessary. In this case it was determined that an additional backcrosses are necessary, BC4 in the case of G. tomentella x G. max to generate fertile hybrid plants. F1 hybrid plants produced by the methods as described above were created from wide crosses comprising PI441001, PI441008, PI499939, PI446958, PI509501, PI583970, and PI483224. F1 plants were next crossed as a female with a male recurrent G. max plant to perform a first backcross (BC1 progeny). BC1 Progeny were further backcrossed for multiple generations (e.g. BC2). BC plants are evaluated for ASR resistance, chromosome numbers and in some cases lines are genotyped through use of molecular markers as described herein to detect the presence of chromosome intervals corresponding to SEQ ID NOs 1-3 or any marker identified in Tables 1-3.

[0272] The above examples clearly illustrate the advantages of the invention. Although the present invention has been described with reference to specific details of certain embodiments thereof, it is not intended that such details should be regarded as limitations upon the scope of the invention except as and to the extent that they are included in the accompanying claims.

[0273] Throughout this application, various patents, patent publications and non-patent publications are referenced. The disclosures of these patents, patent publications and non-patent publications in their entireties are incorporated by reference herein into this application in order to more fully describe the state of the art to which this invention pertains.

The application's sequence listing, which the Patent Office published only in electronic form, follows.

SEQUENCE LISTING (3 sequences)

SEQ ID NO: 1 - DNA, 2161011 bp, Glycine tomentella
  misc_feature (232)..(542): n is a, c, g, or t
  misc_feature (1189)..(2024): n is a, c, g, or t
  misc_feature (27695)..(28152): n is a, c, g, or t
  misc_feature (34350)..(34876): n is a, c, g, or t
  misc_feature (39058)..(39775): n is a, c, g, or t
  misc_feature (42789)..(42789): n is a, c, g, or t
  misc_feature (43486)..(43497): n is a, c, g, or t
  misc_feature (46936)..(47343): n is a, c, g, or t
  misc_feature (68752)..(69861): n is a, c, g, or t
  misc_feature (71025)..(71025): n is a, c, g, or t
  misc_feature (71644)..(71978): n is a, c, g, or t
  misc_feature (73643)..(75731): n is a, c, g, or t
  misc_feature (80021)..(80063): n is a, c, g, or t
  misc_feature (83433)..(83447): n is a, c, g, or t
  misc_feature (88888)..(89699): n is a, c, g, or t
  misc_feature (92607)..(93447): n is a, c, g, or t
  misc_feature (97696)..(97705): n is a, c, g, or t
  misc_feature (98268)..(98277): n is a, c, g, or t
  misc_feature (102079)..(103039): n is a, c, g, or t
  misc_feature (107223)..(107232): n is a, c, g, or t
  misc_feature (107518)..(107527): n is a, c, g, or t
  misc_feature (116734)..(116805): n is a, c, g, or t
  misc_feature (125606)..(125615): n is a, c, g, or t
  misc_feature (126208)..(126217): n is a, c, g, or t
  misc_feature (127797)..(127939): n is a, c, g, or t
  misc_feature (128742)..(128751): n is a, c, g, or t
  misc_feature (130573)..(130585): n is a, c, g, or t
  misc_feature (131399)..(131448): n is a, c, g, or t
  misc_feature (132115)..(132980): n is a, c, g, or t
  misc_feature (138462)..(138737): n is a, c, g, or t
  misc_feature (152148)..(153636): n is a, c, g, or t
  misc_feature (159304)..(159371): n is a, c, g, or t
  misc_feature (159643)..(159652): n is a, c, g, or t
  misc_feature (164638)..(164661): n is a, c, g, or t
  misc_feature (165559)..(165568): n is a, c, g, or t
  misc_feature (166201)..(166814): n is a, c, g, or t
  misc_feature (167478)..(167723): n is a, c, g, or t
  misc_feature (171804)..(172662): n is a, c, g, or t
  misc_feature (182271)..(182271): n is a, c, g, or t
  misc_feature (184077)..(184556): n is a, c, g, or t
  misc_feature (187128)..(187951): n is a, c, g, or t
  misc_feature (189778)..(190491): n is a, c, g, or t
  misc_feature (195863)..(196266): n is a, c, g, or t
  misc_feature (199729)..(200889): n is a, c, g, or t
  misc_feature (208459)..(208530): n is a, c, g, or t
  misc_feature (210980)..(211922): n is a, c, g, or t
  misc_feature (214962)..(214962): n is a, c, g, or t
  misc_feature (227527)..(227590): n is a, c, g, or t
  misc_feature (227731)..(228260): n is a, c, g, or t
  misc_feature (233426)..(236071): n is a, c, g, or t
  misc_feature (236522)..(236546): n is a, c, g, or t
  misc_feature (237239)..(238625): n is a, c, g, or t
  misc_feature (240386)..(240718): n is a, c, g, or t
  misc_feature (243775)..(244741): n is a, c, g, or t
  misc_feature (258004)..(258026): n is a, c, g, or t
  misc_feature (263820)..(263877): n is a, c, g, or t
  misc_feature (273899)..(273969): n is a, c, g, or t
  misc_feature (278186)..(278233): n is a, c, g, or t
  misc_feature (278673)..(278673): n is a, c, g, or t
  misc_feature (280392)..(280776): n is a, c, g, or t
  misc_feature (281092)..(281101): n is a, c, g, or t
  misc_feature (288175)..(288316): n is a, c, g, or t
  misc_feature (289200)..(289209): n is a, c, g, or t
  misc_feature (290820)..(290820): n is a, c, g, or t
  misc_feature (293487)..(293800): n is a, c, g, or t
  misc_feature (294115)..(294143): n is a, c, g, or t
  misc_feature (298303)..(298837): n is a, c, g, or t
  misc_feature (300960)..(300993): n is a, c, g, or t
  misc_feature (301888)..(301922): n is a, c, g, or t
  misc_feature (306751)..(306751): n is a, c, g, or t
  misc_feature (306993)..(307035): n is a, c, g, or t
  misc_feature (312092)..(312124): n is a, c, g, or t
  misc_feature (319535)..(319535): n is a, c, g, or t
  misc_feature (336221)..(336762): n is a, c, g, or t
  misc_feature (338413)..(339051): n is a, c, g, or t
  misc_feature (339705)..(339844): n is a, c, g, or t
  misc_feature (342182)..(343420): n is a, c, g, or t
  misc_feature (348065)..(348153): n is a, c, g, or t
  misc_feature (361226)..(361440): n is a, c, g, or t
  misc_feature (367246)..(367246): n is a, c, g, or t
  misc_feature (367460)..(367635): n is a, c, g, or t
  misc_feature (372257)..(372266): n is a, c, g, or t
  misc_feature (374978)..(375674): n is a, c, g, or t
  misc_feature (383395)..(383924): n is a, c, g, or t
  misc_feature (399117)..(399126): n is a, c, g, or t
  misc_feature (401080)..(401159): n is a, c, g, or t
  misc_feature (402705)..(403239): n is a, c, g, or t
  misc_feature (403707)..(403743): n is a, c, g, or t
  misc_feature (410339)..(410357): n is a, c, g, or t
  misc_feature (412867)..(413206): n is a, c, g, or t
  misc_feature (413525)..(413572): n is a, c, g, or t
  misc_feature (415666)..(416051): n is a, c, g, or t
  misc_feature (423455)..(425605): n is a, c, g, or t
  misc_feature (442558)..(442640): n is a, c, g, or t
  misc_feature (444606)..(444615): n is a, c, g, or t
  misc_feature (444927)..(444936): n is a, c, g, or t
  misc_feature (445205)..(445214): n is a, c, g, or t
  misc_feature (448508)..(450086): n is a, c, g, or t
  misc_feature (465735)..(474443): n is a, c, g, or t
  misc_feature (480291)..(480291): n is a, c, g, or t
  misc_feature (486115)..(486234): n is a, c, g, or t
  misc_feature (491729)..(491803): n is a, c, g, or t
  misc_feature (499024)..(499055): n is a, c, g, or t
  misc_feature (512452)..(512572): n is a, c, g, or t
  misc_feature (513852)..(513858): n is a, c, g, or t
  misc_feature (522013)..(522392): n is a, c, g, or t
  misc_feature (527132)..(527338): n is a, c, g, or t
  misc_feature (543253)..(543328): n is a, c, g, or t
  misc_feature (554941)..(555472): n is a, c, g, or t
  misc_feature (556719)..(558308): n is a, c, g, or t
  misc_feature (567372)..(567503): n is a, c, g, or t
  misc_feature (567972)..(568605): n is a, c, g, or t
  misc_feature (570233)..(575081): n is a, c, g, or t
  misc_feature (586749)..(586758): n is a, c, g, or t
  misc_feature (587101)..(587252): n is a, c, g, or t
  misc_feature (611207)..(611207): n is a, c, g, or t
  misc_feature (623545)..(624535): n is a, c, g, or t
  misc_feature (632434)..(632478): n is a, c, g, or t
  misc_feature (636395)..(636395): n is a, c, g, or t
  misc_feature (651126)..(651388): n is a, c, g, or t
  misc_feature (651675)..(651684): n is a, c, g, or t
  misc_feature (654003)..(654012): n is a, c, g, or t
  misc_feature (654442)..(654451): n is a, c, g, or t
  misc_feature (657339)..(657343): n is a, c, g, or t
  misc_feature (667119)..(667377): n is a, c, g, or t
  misc_feature (672746)..(673568): n is a, c, g, or t
  misc_feature (676643)..(676652): n is a, c, g, or t
  misc_feature (678060)..(678136): n is a, c, g, or t
  misc_feature (711183)..(711385): n is a, c, g, or t
  misc_feature (711661)..(711670): n is a, c, g, or t
  misc_feature (715729)..(715740): n is a, c, g, or t
  misc_feature (726340)..(726340): n is a, c, g, or t
  misc_feature (728722)..(729130): n is a, c, g, or t
  misc_feature (730469)..(730530): n is a, c, g, or t
  misc_feature (737934)..(738525): n is a, c, g, or t
  misc_feature (753977)..(754303): n is a, c, g, or t
  misc_feature (759902)..(759911): n is a, c, g, or t
  misc_feature (765973)..(766026): n is a, c, g, or t
  misc_feature (766342)..(766351): n is a, c, g, or t
  misc_feature (770989)..(771193): n is a, c, g, or t
  misc_feature (771565)..(771811): n is a, c, g, or t
  misc_feature (777963)..(777972): n is a, c, g, or t
  misc_feature (778720)..(778807): n is a, c, g, or t
  misc_feature (779476)..(779485): n is a, c, g, or t
  misc_feature (779786)..(780084): n is a, c, g, or t
  misc_feature (793959)..(793968): n is a, c, g, or t
  misc_feature (794321)..(794331): n is a, c, g, or t
  misc_feature (794600)..(794855): n is a, c, g, or t
  misc_feature (797547)..(797547): n is a, c, g, or t
  misc_feature (798158)..(798195): n is a, c, g, or t
  misc_feature (799910)..(799974): n is a, c, g, or t
  misc_feature (802347)..(802395): n is a, c, g, or t
  misc_feature (806986)..(807168): n is a, c, g, or t
  misc_feature (816353)..(816880): n is a, c, g, or t
  misc_feature (817160)..(817169): n is a, c, g, or t
  misc_feature (820471)..(821275): n is a, c, g, or t
  misc_feature (826529)..(826834): n is a, c, g, or t
  misc_feature (827128)..(827306): n is a, c, g, or t
  misc_feature (827581)..(827590): n is a, c, g, or t
  misc_feature (831115)..(831124): n is a, c, g, or t
  misc_feature (832795)..(833118): n is a, c, g, or t
  misc_feature (851301)..(851590): n is a, c, g, or t
  misc_feature (858081)..(865746): n is a, c, g, or t
  misc_feature (874381)..(874391): n is a, c, g, or t
  misc_feature (876931)..(877366): n is a, c, g, or t
  misc_feature (877633)..(877645): n is a, c, g, or t
  misc_feature (895173)..(895612): n is a, c, g, or t
  misc_feature (895929)..(895938): n is a, c, g, or t
  misc_feature (901223)..(901250): n is a, c, g, or t
  misc_feature (904860)..(904869): n is a, c, g, or t
  misc_feature (905660)..(905669): n is a, c, g, or t
  misc_feature (906805)..(906893): n is a, c, g, or t
  misc_feature (911106)..(911115): n is a, c, g, or t
  misc_feature (911718)..(911727): n is a, c, g, or t
  misc_feature (932441)..(932501): n is a, c, g, or t
  misc_feature (936449)..(936453): n is a, c, g, or t
  misc_feature (950842)..(951528): n is a, c, g, or t
  misc_feature (956196)..(956254): n is a, c, g, or t
  misc_feature (964452)..(965109): n is a, c, g, or t
  misc_feature (966352)..(966469): n is a, c, g, or t
  misc_feature (972263)..(972431): n is a, c, g, or t
  misc_feature (977163)..(977192): n is a, c, g, or t
  misc_feature (990812)..(990959): n is a, c, g, or t
  misc_feature (991264)..(991273): n is a, c, g, or t
  misc_feature (996857)..(996877): n is a, c, g, or t
  misc_feature (997405)..(997414): n is a, c, g, or t
  misc_feature (1000786)..(1000795): n is a, c, g, or t
  misc_feature (1001102)..(1001161): n is a, c, g, or t
  misc_feature (1004946)..(1005514): n is a, c, g, or t
  misc_feature (1008160)..(1008344): n is a, c, g, or t
  misc_feature (1008655)..(1009169): n is a, c, g, or t
  misc_feature (1011132)..(1011676): n is a, c, g, or t
  misc_feature (1020354)..(1020363): n is a, c, g, or t
  misc_feature (1020960)..(1020969): n is a, c, g, or t
  misc_feature (1021665)..(1022325): n is a, c, g, or t
  misc_feature (1043869)..(1043901): n is a, c, g, or t
  misc_feature (1061489)..(1061511): n is a, c, g, or t
  misc_feature (1077477)..(1077578): n is a, c, g, or t
  misc_feature (1083186)..(1083251): n is a, c, g, or t
  misc_feature (1101540)..(1101618): n is a, c, g, or t
  misc_feature (1107288)..(1107288): n is a, c, g, or t
  misc_feature (1110388)..(1110397): n is a, c, g, or t
  misc_feature (1111007)..(1111016): n is a, c, g, or t
  misc_feature (1114809)..(1114903): n is a, c, g, or t
  misc_feature (1115310)..(1115435): n is a, c, g, or t
  misc_feature (1135471)..(1136230): n is a, c, g, or t
  misc_feature (1136604)..(1136745): n is a, c, g, or t
  misc_feature (1142338)..(1143418): n is a, c, g, or t
  misc_feature (1144633)..(1144935): n is a, c, g, or t
  misc_feature (1145507)..(1145516): n is a, c, g, or t
  misc_feature (1172212)..(1172763): n is a, c, g, or t
  misc_feature (1173033)..(1173042): n is a, c, g, or t
  misc_feature (1178918)..(1179112): n is a, c, g, or t
  misc_feature (1179520)..(1179529): n is a, c, g, or t
  misc_feature (1182184)..(1183003): n is a, c, g, or t
  misc_feature (1188723)..(1188898): n is a, c, g, or t
  misc_feature (1189231)..(1189240): n is a, c, g, or t
  misc_feature (1206747)..(1206756): n is a, c, g, or t
  misc_feature (1207129)..(1207138): n is a, c, g, or t
  misc_feature (1208749)..(1209257): n is a, c, g, or t
  misc_feature (1215323)..(1215352): n is a, c, g, or t
  misc_feature (1219836)..(1219836): n is a, c, g, or t
  misc_feature (1220230)..(1220366): n is a, c, g, or t
  misc_feature (1221987)..(1222344): n is a, c, g, or t
  misc_feature (1228018)..(1228018): n is a, c, g, or t
  misc_feature (1228701)..(1229114): n is a, c, g, or t
  misc_feature (1251982)..(1251982): n is a, c, g, or t
  misc_feature (1252581)..(1252639): n is a, c, g, or t
  misc_feature (1266268)..(1266273): n is a, c, g, or t
  misc_feature (1266747)..(1266747): n is a, c, g, or t
  misc_feature (1278786)..(1279731): n is a, c, g, or t
  misc_feature (1280142)..(1280151): n is a, c, g, or t
  misc_feature (1294528)..(1294640): n is a, c, g, or t
  misc_feature (1300722)..(1301355): n is a, c, g, or t
  misc_feature (1305288)..(1305297): n is a, c, g, or t
  misc_feature (1305633)..(1306005): n is a, c, g, or t
  misc_feature (1306286)..(1306286): n is a, c, g, or t
  misc_feature (1313825)..(1313855): n is a, c, g, or t
  misc_feature (1314062)..(1314071): n is a, c, g, or t
  misc_feature (1314669)..(1314678): n is a, c, g, or t
  misc_feature (1317594)..(1317663): n is a, c, g, or t
  misc_feature (1329103)..(1330299): n is a, c, g, or t
  misc_feature (1336819)..(1336927): n is a, c, g, or t
  misc_feature (1340253)..(1340262): n is a, c, g, or t
  misc_feature (1340626)..(1340635): n is a, c, g, or t
  misc_feature (1354350)..(1355377): n is a, c, g, or t
  misc_feature (1355891)..(1355900): n is a, c, g, or t
  misc_feature (1359591)..(1360191): n is a, c, g, or t
  misc_feature (1360537)..(1360546): n is a, c, g, or t
  misc_feature (1367736)..(1367745): n is a, c, g, or t
  misc_feature (1373951)..(1373956): n is a, c, g, or t
  misc_feature (1389763)..(1390275): n is a, c, g, or t
  misc_feature (1408345)..(1408354): n is a, c, g, or t
  misc_feature (1408830)..(1408839): n is a, c, g, or t
  misc_feature (1413309)..(1413462): n is a, c, g, or t
  misc_feature (1414082)..(1414091): n is a, c, g, or t
  misc_feature (1422031)..(1422085): n is a, c, g, or t
  misc_feature (1425866)..(1426077): n is a, c, g, or t
  misc_feature (1428500)..(1428553): n is a, c, g, or t
  misc_feature (1431771)..(1432012): n is a, c, g, or t
  misc_feature (1471016)..(1471016): n is a, c, g, or t
  misc_feature (1472157)..(1472157): n is a, c, g, or t
  misc_feature (1490401)..(1490434): n is a, c, g, or t
  misc_feature (1524750)..(1524880): n is a, c, g, or t
  misc_feature (1525767)..(1525815): n is a, c, g, or t
  misc_feature (1525997)..(1526182): n is a, c, g, or t
  misc_feature (1526720)..(1526729): n is a, c, g, or t
  misc_feature (1544956)..(1545277): n is a, c, g, or t
  misc_feature (1547328)..(1547328): n is a, c, g, or t
  misc_feature (1569565)..(1569570): n is a, c, g, or t
  misc_feature (1570130)..(1570209): n is a, c, g, or t
  misc_feature (1574906)..(1575826): n is a, c, g, or t
  misc_feature (1584912)..(1584912): n is a, c, g, or t
  misc_feature (1586087)..(1586087): n is a, c, g, or t
  misc_feature (1591417)..(1591654): n is a, c, g, or t
  misc_feature (1600035)..(1602346): n is a, c, g, or t
  misc_feature (1605288)..(1605456): n is a, c, g, or t
  misc_feature (1609329)..(1610466): n is a, c, g, or t
  misc_feature (1637714)..(1638008): n is a, c, g, or t
  misc_feature (1642324)..(1642889): n is a, c, g, or t
  misc_feature (1655712)..(1655738): n is a, c, g, or t
  misc_feature (1660190)..(1660255): n is a, c, g, or t
  misc_feature (1661554)..(1662099): n is a, c, g, or t
  misc_feature (1673754)..(1673814): n is a, c, g, or t
  misc_feature (1679189)..(1679199): n is a, c, g, or t
  misc_feature (1681864)..(1681906): n is a, c, g, or t
  misc_feature (1686922)..(1687410): n is a, c, g, or t
  misc_feature (1693471)..(1693531): n is a, c, g, or t
  misc_feature (1697149)..(1697400): n is a, c, g, or t
  misc_feature (1699007)..(1699035): n is a, c, g, or t
  misc_feature (1699198)..(1699707): n is a, c, g, or t
  misc_feature (1703020)..(1703066): n is a, c, g, or t
  misc_feature (1706436)..(1706586): n is a, c, g, or t
  misc_feature (1706796)..(1706903): n is a, c, g, or t
  misc_feature (1712786)..(1712795): n is a, c, g, or t
  misc_feature (1713488)..(1713497): n is a, c, g, or t
  misc_feature (1714888)..(1714897): n is a, c, g, or t
  misc_feature (1716192)..(1716192): n is a, c, g, or t
  misc_feature (1716477)..(1716486): n is a, c, g, or t
  misc_feature (1717058)..(1717129): n is a, c, g, or t
  misc_feature (1729199)..(1729199): n is a, c, g, or t
  misc_feature (1730875)..(1731409): n is a, c, g, or t
  misc_feature (1742073)..(1742082): n is a, c, g, or t
  misc_feature (1745652)..(1745879): n is a, c, g, or t
  misc_feature (1762375)..(1762741): n is a, c, g, or t
  misc_feature (1764159)..(1764263): n is a, c, g, or t
  misc_feature (1768502)..(1768650): n is a, c, g, or t
  misc_feature (1784724)..(1784733): n is a, c, g, or t
  misc_feature (1786545)..(1786545): n is a, c, g, or t
  misc_feature (1788727)..(1788727): n is a, c, g, or t
  misc_feature (1805126)..(1805136): n is a, c, g, or t
  misc_feature (1806844)..(1806853): n is a, c, g, or t
  misc_feature (1824888)..(1824888): n is a, c, g, or t
  misc_feature (1825437)..(1825703): n is a, c, g, or t
  misc_feature (1828574)..(1828940): n is a, c, g, or t
  misc_feature (1862180)..(1862267): n is a, c, g, or t
  misc_feature (1862809)..(1862921): n is a, c, g, or t
  misc_feature (1863119)..(1863166): n is a, c, g, or t
  misc_feature (1883234)..(1883614): n is a, c, g, or t
  misc_feature (1883974)..(1883983): n is a, c, g, or t
  misc_feature (1889728)..(1890739): n is a, c, g, or t
  misc_feature (1902396)..(1902851): n is a, c, g, or t
  misc_feature (1903295)..(1903295): n is a, c, g, or t
  misc_feature (1916089)..(1916112): n is a, c, g, or t
  misc_feature (1932732)..(1932782): n is a, c, g, or t
  misc_feature (1935237)..(1935371): n is a, c, g, or t
  misc_feature (1938672)..(1938672): n is a, c, g, or t
  misc_feature (1942882)..(1942891): n is a, c, g, or t
  misc_feature (1946838)..(1947159): n is a, c, g, or t
  misc_feature (1956951)..(1956951): n is a, c, g, or t
  misc_feature (1972859)..(1972859): n is a, c, g, or t
  misc_feature (1976478)..(1976567): n is a, c, g, or t
  misc_feature (2007289)..(2007671): n is a, c, g, or t
  misc_feature (2008028)..(2008037): n is a, c, g, or t
  misc_feature (2017248)..(2017450): n is a, c, g, or t
  misc_feature (2017657)..(2017741): n is a, c, g, or t
  misc_feature (2021761)..(2021761): n is a, c, g, or t
  misc_feature (2022808)..(2022913): n is a, c, g, or t
  misc_feature (2023354)..(2023379): n is a, c, g, or t
  misc_feature (2029601)..(2029601): n is a, c, g, or t
  misc_feature (2029986)..(2030506): n is a, c, g, or t
  misc_feature (2033137)..(2034895): n is a, c, g, or t
  misc_feature (2048896)..(2049072): n is a, c, g, or t
  misc_feature (2050306)..(2050306): n is a, c, g, or t
  misc_feature (2052130)..(2052130): n is a, c, g, or t
  misc_feature (2064537)..(2064546): n is a, c, g, or t
  misc_feature (2071524)..(2072529): n is a, c, g, or t
  misc_feature (2072928)..(2072937): n is a, c, g, or t
  misc_feature (2073430)..(2073583): n is a, c, g, or t
  misc_feature (2074468)..(2074477): n is a, c, g, or t
  misc_feature (2074781)..(2074935): n is a, c, g, or t
  misc_feature (2076820)..(2076820): n is a, c, g, or t
  misc_feature (2078327)..(2078327): n is a, c, g, or t
  misc_feature (2084164)..(2084164): n is a, c, g, or t
  misc_feature (2085453)..(2085453): n is a, c, g, or t
  misc_feature (2093820)..(2093829): n is a, c, g, or t
  misc_feature (2096999)..(2098183): n is a, c, g, or t
  misc_feature (2098962)..(2099023): n is a, c, g, or t
  misc_feature (2099643)..(2099783): n is a, c, g, or t
  misc_feature (2120304)..(2120340): n is a, c, g, or t
  misc_feature (2123051)..(2128165): n is a, c, g, or t
  misc_feature (2128923)..(2129963): n is a, c, g, or t
  misc_feature (2148336)..(2148375): n is a, c, g, or t
  misc_feature (2155481)..(2155483): n is a, c, g, or t
  misc_feature (2156427)..(2156751): n is a, c, g, or t
  misc_feature (2157640)..(2157649): n is a, c, g, or t
agtgcaattcctttgtttttcctgtctgcatcttcaccaaaggttagctgagacagttcaagttcatattcaagcaacttaccaaaaagtgcagccattgacatctttgatagatcctttgattctttgatggctgtaactttgggttgccatgctctactaaggcatttcagaatcttgatgttaagttcttcagcatcaaaggttttaccaagtcctaggagatgattcnnnnnnnnnnnnnnnnnnnnnnnnnnnnnnnnnnnnnnnnnnnnnnnnnnnnnnnnnnnnnnnnnnnnnnnnnnnnnnnnnnnnnnnnnnnnnnnnnnnnnnnnnnnnnnnnnnnnnnnnnnnnnnnnnnnnnnnnnnnnnnnnnnnnnnnnnnnnnnnnnnnnnnnnnnnnnnnnnnnnnnnnnnnnnnnnnnnnnnnnnnnnnnnnnnnnnnnnnnnnnnnnnnnnnnnnnnnnnnnnnnnnnnnnnnnnnnnnnnnnnnnnnnnnnnnnnnnnnnnnnnnnnnnnnnnnnnnnnnnnnnnnnnnnnnntttgtgaggtgttcattttaataaaaatgcagtgatcttgaatatcttacaagacctagctcttgatgccaattgttaaaaataaggaacactcacacttaaccaagagggggggtgaattggttaaccttggtaagtaaaaactttctttgaagaaaacgcaattttcaaatcagtattttattgcccttaggatctttatcacaaaaaccaaaagaatatctttatccaatatcaattcaggacttgttatgctacaagattaatcacacaaaaacagagttcacacaagaattaatcaaagcaatagaatgtaaatcaaaacacaagagttatactggttcacctcaaaacctatgaggctacatccagtttcttctactcaacactagagtagagttccactattgcataaatgtttcttacaagcaattacaagcttctcttcttcaaccctagaagaagttcagagatctaaaacactattagatccttagaagccaaacccacactgagaaacctactcagctgtctttggagaaaccctatctccctaggagaaacactatctcccttgcaagaaaaccccaatacaataggaatacaaaaaacagagtaacaacagaaaccaattacaaacacaagannnnnnnnnnnnnnnnnnnnnnnnnnnnnnnnnnnnnnnnnnnnnnnnnnnnnnnnnnnnnnnnnnnnnnnnnnnnnnnnnnnnnnnnnnnnnnnnnnnnnnnnnnnnnnnnnnnnnnnnnnnnnnnnnnnnnnnnnnnnnnnnnnnnnnnnnnnnnnnnnnnnnnnnnnnnnnnnnnnnnnnnnnnnnnnnnnnnnnnnnnnnnnnnnnnnnnnnnnnnnnnnnnnnnnnnnnnnnnnnnnnnnnnnnnnnnnnnnnnnnnnnnnnnnnnnnnnnnnnnnnnnnnnnnnnnnnnnnnnnnnnnnnnnnnnnnnnnnnnnnnnnnnnnnnnnnnnnnnnnnnnnnnnnnnnnnnnnnnnnnnnnnnnnnnnnnnnnnnnnnnnnnnnnnnnnnnnnnnnnnnnnnnnnnnnnnnnnnnnnnnnnnnnnnnnnnnnnnnnnnnnnnnnnnnnnnnnnnnnnnnnnnnnnnnnnnnnnnnnnnnnnnnnnnnnnnnnnnnnnnnnnnnnnnnnnnnnnnnnnnnnnnnnnnnnnnnnnnnnnnnnnnnnnnnnnnnnnnnnnnnnnnnnnnnnnnnnnnnnnnnnnnnnnnnnnnnnnnnnnnnnnnnnnnnnnnnnnnnnnnnnnnnnnnnnnnnnnnnnnnnnnnnnnnnnnnnnnnnnnnnnnnnnnnnnnnnnnnnnnnnnnnnnnnnnnnnnnnnnnnnnnnnnnnnnnnnnnnnnnnnnnnnnnnnnnnnnnnnnnnnnnnnnnnnnnnnnnnnnnnnnnnnnnnnnnnnnnnnnnnnnnnnnnnnnnnnnnnnnnnnnnnnnnnnnnnnnnnnnnnnnnnnnnnnnnnnnntgttaacgttcaaaataatcgattaacccgaggcgtaatcgattaaaccagttctgggcaaaatcctgattgtgaagtgtaatcgattacatccgattgtaatcgattaatccaggtaatgcataaatcatgtttgtaaaagataatcgattacattcattggtaatcgattaaaccagtgagataaaaaacatgaatgaactaaaataatcgattacaaatattggtaatcgattaaagcagagtgactgagttttccaaacaagcatgtaatcgattacgacattatggtaatcgattaaaacagtcacaaggccaaatcctaagcatgctgagtttcgtgtaatcgattaatccgataaggtaatcgattaaagtgttcatgtttgattttccagaaagcttatgaacaaaataatcgattctttcgatgcaataatcgattaaaccagtcatgaactatttttccaaaatattaggctttttcttacatttcaaattaattctataaagtttatatgatgcaatgctagatatgtgtatgaatgatatgtatgcaaagcttggatcaccatagtgctttcaatccttttacattaaatcacaaactctcatcttcagtcttcaagctcatgttgaaagccaaaatgtccaagtcttcatgtatttgattctccaaaatcttcatgtagctccccctcaaatcaacaatgcttcagttgcaagattggaagcaatcaggttattacttgcatatgcatgtctcatgaatttcaaactttttcaaatggatgttaaaagtgcatttttgaatggatacattaaggaggacatatatgttgaacaacctcctggttttactgattttaaacatcataactatgtttttaaactgaaaaaggcactttatggtttgaaacaggctcctagatcatggtatgaaagagtaagcaaatttctacttgaacaatctttcacaaggggcaatgttgacaaaatcttgttcatcaaaaggcatggcaatgatatctattagttcaagtttatgtggatgacataatttttggttatactaatcacttgttgtgtaaggatttttcctcagctatgcagaaagagtttgaaatgtcaataatgggtgaactaacattcttccttggacttcaagtaaagcaaatgaagaatggaacctttcttaatcaatctaaatattgccttgaagttattaagaaatttgaaatggagaaaagcaaggatgttgcaactccaatgactacatcaacatatcttgattcagatgaaagtgggaagaaggttgatgagtctaagttcagaggaatgattggatctttgctatacttgacagccagcagaccagatataatgcttagtgtttgcttatgtgcaagatatcaagcaaatcccaaagagtctcatcttactgctgtcaagaggatcattaaatatctcaaacctacacctaaagttggtctttggtatcctaaaggtgcttcaatcaatattgttggatattctgattctgactttgcaggttgcaaattagatagaaaaagcacaagtggcacttgtcatcttctaggaagttcattaatctcatggcattgcaagaaacaatcttgtgttgctttgtctactgctgaagctgaatacatctcagctggaagttgctgtgcacaaagtttgtggctaaagcagcaaatgcaagactttggagttgaattgaatgaaatacctctgctatgtgacaatacaagtgctattaacatatcaaagaatccaataatgcattcaaggaccaagcataatgagatcagacatcatttcctcagggatcaagttcagaaaggtaatatcaaggttgagttcattgacaccaataatcaacttgctgatatattcactaaaccattaccaagggatagattttatacacttagaaacatgctaggcatccttgatgagtctaatatatgctagcctattttaagtgtgcttatccatgatattttaaagcctctttgatgaagttaccattgattgtttgaaactcgaattgatctgccaaaatgctctgttttttttttaatttgctgctataatcgattaagccacgggataatcgattatattcattaaaattcactgtggttgtgcaagaaaagtaaatgtaatcgattaccacaatcctgtaatcgattattctgtgtttctgaaaattttttcttcctggaataatcgattacacaacgggataatcgattaccttatagaaaatccactttccaatttgtatatcttcctggaataatcgattaccacaatattgtaatcgattacatgtgatctcagaaattttgatcttcctggaataatcgattaccactcgggataatcgattacacaagttctgatacttataagaatctcagtctgactattataatcgattacttagatatataatcaattaaatcttctacctctggaaatctccaaaataatcgattatgttacgggataatcgattatcttgtgtaaaatgtatttttcaaaatgactaaaataatcaattacttaaagttttaatcgattatttaagctgttatgtggattatgacagtttttctgggttttgtaactgccctatcctgtgatttaagcaactgaatcatcattaactggcattaactgtctctaacagctatatttttgaataatttgaacgttagtggatgatctttgtctataaatagtgaatttgtgtcaatttgtgatcttgcaccaaccttattctctcttactctaatttctgtcaaaagcctttgtgtctagcaaagttctttgagtttcctaaatcccttatagaatggccacaccaaaaagagctagaactgcaaaatgtaaagtaggggagtcttcctcaaacccacaaccaccacctgatagattgagcctgtggttcaataaagagtatgataaaatgcattatcttcaattcaatgccaccaaacccattagtgcacccaaatacttgaacctaggttggtttaccaaagaaggtttcacatatctagcctttctagaggaacaaggccttaggaaatttgttgagatgaagggtacttactaccctgacttggttaagatcttttatacatgtgccaaggcatctatgagtggcagccttaagtccactgttaaaggtgttgagatggaaattactcctgaactgtgggagtcaattgttggggtagaatgtgtaagggagaggaaatttgaagaaacccccaatggttacaacaaaagagggatttatagagaaatgctcacagacccaaacatgcctattagaaataggttgagtactggtccaatggcaccagaaaacagattgattcactaccttatcacctacatcctaaccccaagggcaacaaaccatgcccaagccactgatgaagacatacaattaatgtatggaataacaaacttcattcagatgaattgggtcattatctttcaagagataatgttaaaagcaaaaaggcttgtcaactatcccttcccgtacccaattctcatctctagattcattgatcactttcagattgatgtttctaatgaagtggtggacaacaccaactcttcaaacaacctcatccaagagaagcacttgactaagcttggattggtaaagacacccaatggcttggacaacaacaacaacaacaacaacaagcacctcctgttgctgctgctgaacatgaaggccatcaagtgcctgattctgaggaggaggaagaagaagaagaaagagaggattcttaacagcctcttcaatactagatttgagtccctcatgttagcaaaaatggatgggctgcttcaaatgcatcatgatttccaggctgaaactcgaggctctctaagagaaatcaatgatagactagatgacatagaagcaacacttaggatggatgattctgaagacttttaatttgcttcttgtattctgtttttattcagtatgattatgtaattctcctcttaaatatcaatgaacaattatgttttattcacttgaatccgctgtgccttgcaatttttttctttaaaaagccaaatagggggagaaaatttgattttatcaatgctctgcatatgactgtttgcccatgtttttgtgtgcgttttttggcaaaaatttgatctaaaaagtttatgaaatttaggggaagataattgctcaaaatgattgatttaagtaaataaatcatatgaatgaatgctacattaatcacagatgcttttaacacttgttcttgcaaatgaattgaattttttaggtttgaaaaagcttaaacaagtgttgtgatggttcctccaataaatctcaaaacccactgctaatcaattaaagatttggcatgtttaaagtcaaaaagggggagattgttaaattcagggggagctgcttgaatcataagcaatgattggttcaaggttcaaggttcaaggttttagctttcaacatgccttgaagtaatgaagagtaacttctgattaatttataaaaggaagaagttaatctggtgatccaagtgcattgagctttcaacatgccttgaagtattgaagagcaacttctggttaatttgtaaaaggaagaagttaatctggtgatccaagtgcattgcattcatagcattcatttagtaaagcattttgagatatagaattcacaaggcattgattaattgtttaagatttgaattcaatcaagagtttttggaaaaataatgtcttgaactgatttaatcgattacaacatgataggaatcgattattttgttcttatgctttctggaaaacttttcaagaacaatgtaatcgattacgtatcggattaatcgattattttacattgattcacatataaactgccttgatgaacattttaatcgattaccaataggcagtaatcgattacataggctaaacaggaaaaactaccttcctgtcttaatcgattaccaatgatagtaatcgattacactacatgctcatactttatatgatcttctgctttaatcgattaccaattgaagtaatcgattacatagttcaatgggttttatactgcttcctgctttaatcgattaccaattgaagtaatcgattacttagttaaatgaagtttatacaacttcctggtttaatcgattaccagaacccataatcgattactctgtgtatttcaagtttttagaagttcctgctttaatcgattactatacggattaatcaattattttgatctttgcttatatccagatttttgaagaacagtttaatcgattacaggagcgtatgtaatcgattacataagcaaaataatcgattacaggagcgtttttaatcgatcactgacggttagaaaaatttgttataaatagaaaccttgctcagctattttcataacttgactaattcgtattctgagcaatcaaaggctttctaaacattctttaagagtttttctgggttcattgagttcttgcttacacacaaacacttatgggtttctaagtgattcatgaagcaagaagtttcttttcaaagattaaggaaggagatgttttaagtttgattttacttttcaacctgattactcattcatctgcatatcatttgctggatcatcaggtgatttctttctttatctttctaaggttgtaattcgttttttgaatttgaatgtaatttttgtatattgtaaatgggtttcttgcttgtaatctagagatagagtttctctaggggataaactgagtagtgttctcagtgggattatctctaagaatctaatagtgtttttgatttctgaactttatctagggttgataaagagagatattgtattacttgtaagaacagattttacaatagtggaactccattcttcagttaagtggaagaaaactggatgtagcttcatagtgtttgaagtgaaccagtataaattatgattgttctttattctcttctcatcatcatcttcttattgctttgaattctttgaatcatattcattgcacatcaagttttgtttttgatctatggaattcttggacagtggtatttgattgaatataaaggttcttggtttcaaaggttttgaaagtgataaagatcctgtggaaactctgatattgaaatttttatataccaaggttcaaccaattcaccctccctcttggttgtattgaagtattcctattattttcacccattgcctgagctaaggcttggagagcatcaacacgatcattcctaccagccatcacttcctgcgcacaccaataagtgagaatctggaaggaatacacataacaaaagaatcaagacaattttacatttactaaaaaaaatccccacttaaacactattgaagttgatgcctcaacaaatcagtcctttatgttctttctcaagacaataacacatatacttcacccttcgtatttctgactgtttgccatagtgttccattgcaattcacgaattattcagatggccagtctgataactcatgacaagacactgaaacctatggtataactgacatcgggaatacaaatatgttatgatcattctactaaatcttcacaacccatgcatcacaacaatgtatgcaagtcttacaaacaacccaagcaactacaaaacagacaaatactcaaacattgagcacaaaatacacaaagaaacataatagattcaccactcaccgcaagcaaacacaaatacacagcagactcacaactcaccggccgaaaaggttcgacctgctctgataccactaatgtaacgacccgcctcgtcgctacgatatcactaactcttaatcgtgcaatttcaatttttaataaaacttcattaatttgattatgaaaatgatggtactttttttttgcgataatacaattatcatacatattacaattacatattaaaacacattatacatatatattaaatcagtacatgtcatccacatgttagaacttccttatgtatatacacatgaaattacatatcaacaaaaggccaaagactaactaagagagagttgatcaacaaaacacaactctttctccaaaagaaatccaacgttatcacgtcggcttggtggctccaaccaacaagaagatctccctccaaagtcacctactgctgcttatctgctcccacgaacgaaagttcgcgatcatcacaggtgccaaccacacagtacaacaaatgcaagggttagtttattatataaaaccaacaagcatcaaataacaacaattggaaagaaaacaacattaacaaccactatcattaccacaagttcattagcccaattcacactcgacaaaccgatcatccaatgcatttcacaactcaaacaatcatgcatagaatgatgcacgtacctgacacatctatcagcatgcaatgtggtaccatcctcatgaaaatagcctctctcaggaaaatgatgtagtagctcgtcgaggtcactctgtcgtgcactggtcgctcccccccatggtgttcagccctgagtcacaagggagttccaaacagagtgatgccccctagtacccccgtacttactgccaccattctatttccatccatgaaatatgaagtatgaacatgggcaccatcaatgcaatgaccatggatagatagggaccggaattttaacaatccctttctctcttgggatgcttaaaattcgtaaacccaccctcgcaaggttatccagtcatgtacccccatgtacatacacaacatcatcgatacactgaccacggttagatagggaccgaaattttaaacaatcccattctctcttaggatgcttaaaattcgtaaaccaaccttcgcaaggttatccagtcatgcatatcaatattatctcatttcaacatcatcaatcacgtcaatgatatctcaatctcaatatcatcaacaacatcacaagaaatcacatatcacatctatacataatacatatgcctgagattcacatttcccaggtcttcagaaatgcaaatttcatacattcacaattcatcatatcacaagactgatatttttaggaaaattctaaattaaagaggaggactacaatatataaaacacactcttatgcccatttaaaaatttaataaagaattaaataggaaaacatattataaaattttgggcaaagtctcctctataattaagactttttccaaaaatccaatcattacaacaacaatatcattcatagttttatccatcaacaagccaattcataacatcccattagttaaaaacaatttttcttgaaaacgaacacacacaagaacaaacacacatcattcataaatatatcgcataccattagttaaaaacatagtttttttcttaaaaaccagcacacagcagggacaggcagatatcctcatagttggactccttggcccccaactatggtaccaaaattataaccaaataataaactccccttacctatctttgtccctttattagcttcttgtagcatcgttttgaggtctctcaagttcacgtgctaatctatacatcattaaattcccatcttttagtatgttaaactagacttcctaagatttctaacaaggtatcacatgacttatttggatttctaaaactctagatcaagcatttttaaaactagatttcaaagctgccagcaagttccagtttccacactaacatctcttagtgttctcatgactgcgagcattacacaatttatatttattttaaattttatatgttatagttgacatccatatatttaattccatatatcttacacttaatttgagtaagaaatgagggagaaataaatttttcaaaacggatggcagaatctgtttggtgtgaacagtttcggacagcttgagctaaaataatttctgggcacgcttcattacttagtttggtcccatattttaggacaacatagaagacatcctaagctttaaaatgagtggtcaaacacctcatttggttaagtacagagggagatatggaaatttcaaaacagtccaaaatttcagtttaaaaccatacgaattttaacagcaatacttaccaaagtatttggctggaatgattcaagagcttgaggaaggagctgcagtttgagtgagaagaaaagaagagaaaatgaagcaaaagtgaatagaggaaaagaagcaagtgaccgtgagttagagaacaagttcacttataggtgcagtttttgattccaagaagatatttttttattcatgcattaaaatgcattcttatcaagcaaaaaaatcaaagattccttcatatggctgaaagaggcacgtggtatgctggctgaaaatgctagattgttgctttgttttatacatggctacacaattggattaagtgtatcaatcctaagtatacacatgattttgcacttccatttaaattattttgttccaattctcacgtataagcatgctttggtttatgtttttgtttcttttaatttaaaaccaagtgttctccatgtaatttttaattaagttgatagctactaatgtctcattcatctaaaatcttaagcctttaccccaaatccttcacagtcagaattggtttcttctcataaattaactaatcataactaaatatattctaagcacttttaaacttacctcttgaatccattagcttctatcctatccttcttgtatcatattaccatcatatgtttcttatatgataattttcctcatcatcacatagtctgaaattatagctcatgatagcttagatattcatgaaatttttctttcatttttactgtgaggtttattttcttgtatttatgacttacttaatcataaattttaagctagtctaggtactcctagttttcttgtgatatttgtctgttattaagggtattttgggtaatttgccatctcaggggcacttttgtaatttcatcaagttttcacaaaatatctaagggtatatttgtaatttttcacttactcaagggtatttttgtatttttttcacttactcaagggtatttttgtatttttacttcaaaatatctaacaaaaatatctaacaaaaatatctaagggcattatggtaattttgcttcaatggcattattgtaattttatttcaatggcattatggtaattttcacatcaagagaaagggtaatatggtcatatcccttcaaacatttttgcaattcctctttttgtttctaattaacatttcacgcaaataattcaaacatagaccaaacaaacttcacacaacctaacatcaagtagttgcacaagattaactcacactacattttaaccatatatttttagttattgaaatttcagggcgttacaaaagacctttccaagacctaataaatggttgacaatatgagtgaatcttgtctgcagctgagaaatgctttcattggtgttcatcttgaacatctcatactcatggatcaaagcatgcttccttgatctcctaacttcttcagttccttcatgagtaatctccagcatctcccacatttcttctgtattcttgcatctcacggttctgaaaaattcatcagaggaaagagcagaggtgatcatatttttggctttcaaatcatattgagcagccttttattcagcttctgtcatctcatcccattctttgggaatcaattcatttgcaacagttttctttggaataaaaggacccttttctatagcattccaagcacctaggtcatttgattgaataaagattttcattctatttttccaaaaactgaaatgttccccttcaaacataggaggtttgtttaaagaagcaccttccttgaaggttatttgtgaggtattcatttttctttttgaagaaaaactagtaatcttgaataactctcaagaaccaactcttgatgccaattgaaaataacagaaatacttcacaacaaccaagaagggggatgaattggttgaaccttggtattttaaaatcaaattcaaatcagagttttcaggatctttatcactttcaaaaccaacaaaccttttactcaatcaaatagctcagtccaagaaatcaatagatcaaaaccaaacttgttgaacaatgaatgtgattcaaagaattaaagacaacgactaagatgagaatagagatatagaaataagaacacaagcaatttatactggttcacttcaacactagaagctacatccagtttcttctaattcacactgaattagagtttcactattataaaatatccttacaagcttttacaagaacctcccctttatcaaccttagataaagaacagaaatccaaaaccctattagacttctaaggagaaagatccagagaacactactctaatctttaagctagagaacccttctctagtcccaagctttaagaatgaaaattacaatagccaatacaacacaattcgtaaacaagattacaatcactgagttaaggaaagaaacaacctgatgatccagtgaatgacatgcacatgaacgaacaattcaggttgaaaaatgaaaaacaatctcagaacatcttcttccttaacctttgaaagaaacttcttgcttaaagaatcactcaaaaacccatgaatgttttagtgaaagcaagaactcatagaaaccagaaaaatcacttagaaagtatttagaaagcttgtgtgtgctcaggatacgaattgatcaagttatgaaacaagctgagccaaagttctatttataacaaacttttgtaattgtcagtaaatcgattaagcgcatcatataatcgattatttaactcatgtaatcgattaaatcaatctggtaatcgattaaaatgtttaacaaaaattttggacatgagcaacaaacaaaataatcgattattccgtcttgtaatcgattaagacaacaagcttcaaagactcaaaatacactatgtaatcgattacgaactctggtaatcgattaaaccaggaagctttaaaaaacatattgaactgtgtaatcgattactatatttggtaattgattcttccagagagacttaaaatcatgttttagcgatgtaatcgattactacccattggtaattgattaaaatgttcatcaaagcagtttctatgaaaacaaaggtcaaataatcgattatttcgataggtaatcgattacattgttcttgaaaacttttccaaaatagaccaagaacaaaataatcgattatatctttaaggtaatcgattaagtcagtacaaaaaccatttttccaaaaacctttgatttaaatcaaaaacttggtcattttactaaagtcttgtgatttttattactcaaattaattgaattattgaatgatatgaatgcaatgcacttggatcaccaaaattgcttctttcttacacatttgacacaaatcattcttcaaggcatccaatgcatgttgaaagctcaaaaccaaagcttgattcctattccattcttcaaatagcttctcctgtaaccaacatactccttatataaaaatagagataatggttaagataaaaagtaatttcaactattatgccaccaagaaaataaacataacagcagagattgtaacttatttcagccattatacacctatcaaatatgccaagtagactaattgaagtgtgagagactaaaagatcatgcaacaaatgaacagattacatatcacacaatggtgtcagaaatgcataccttgtatatatagaaaatctaggaagtgaatcacttcaactaccataataactcctccataaccataaacctgatagctaaatgtagaaggatatgagttaaaacaatattccacgaacaaagttctaagtcaatcacttttgaagcatgatgctcaattaataaggtgctgaatctttgttgactttatggatttcgttccaactatatcattgaataaaatatatttttctctaactttcttgaatcactgcccaccctacaattttcaagtctttcacatggataacaagatggaaatgaacaaggaatgagataagcataccagcattgttcagaagctataaaagtgcaatattagaagtagcttgtttagaactaaacaaatatgtgtttagaagcaagaacctacttgggccattgagtataaatgcaaacaaagcaaaaagaaaattagaagactgatgcacaagcacttcaatattcagaagcacctaaaaaagcatcttgtaggaaacaatattcagaaccaacattcttacagattacaaaacctattagagaatatgcctatggaaatccaactcacaatagttgtcaagaatttaaattcaaatagaagttgggattttgaaaactgaaaaaaaagacaccaaaagtagcaaaagagataaatagatcattcaatgcacaattgagttttcattttagaatattaccaccacttccagccttgaggttatccacctcatagattgtggcttggagggtcccatgcagtagaatctatggaatctatggtaacaaagtttcaatccttaaaatccaaaatattccagaattagtactagtagcatagaagatgaagcgagtttttcaaatgagaaatgaacttttttcaatataaaccaaggaatgtccagcacaaggggatgtacaatttatcagtgtgagcaaccttattccttacaagtaaataagtaaactacgcagtctattaaatgcatagtttaagaaaattacattttatcccacaagattcatgagaaaatgtccatgctcatagggaacctgtcaccaaagctggaaactctgccttgtctcaatgcactttaccttaatggaaacaatctcacaggagagattaacttctttaaggactttttttggaaaaatggggaggtgttttgttgcttggaacaacccaaacctttgctaccaaattggactaatttcatcaagctatgttccatataggataaagccatgccagaaagaggtcaatttcttagaatctgattcaaaaactgagctgatcaacgggatatgaatgagactttccattccatagcctctaagggattttctagttgtgctactaatggcttctggaaaaaatattgatgatgggcttctttctaagtcttatataactctattagtctagaaagagttcaacttcaccaagacaagaagaatcatttgaaatggtacattaactttccccctgctaggtttcaaatccttttctagatagtagttctattttacacttttaaaactatcattttgcaattaacatgttgattttgaacaacattcttttaatgctttacactttgaactatcagtttctcaagtttgttcttttcactttatacaaacataccaccaatacaaaatagtgaaatacagatggaaagatggaaagaaggatcatacccttttgtgttggaaatgtatgcgacatccctccatcaacaatgttcagttgacttaacaaaaaaattgtagtacaacagttataaagtactaatatagcaaattaaattaaacaaactcatttcattcaaattcaaaccatgaaaactcaaaactcactcatacataccttaacgatgtcagataacagggtaaatctcttaatgatgtgtcaccactttaaacaaactccatccgcccaacattaacagacctcactctacgaagcaactcttgagctggattagttagttttgtcccatggttaggtgaatgtccaacttcagagtttgccatttgctgcaccaaaggaaattcaacctctacattccctctattcaaactgcagataaaaactccatgtgtctgggcataacaccaaaaaaccatacaaagcagtaagtagccaaccaagtagccaaccacatgagtccatgtatatgtagtaacattatttcccattgcaactatctggtagaagcaaatatataaatgtttatatttcatgccacaacatctatataaataattgcatatgacataatttcttatttatccaatccacatggagacatagtcctctgtccatgttccatggagtcaaaatggtatccttcaaggacaaaaataactgggcagaattcaacgggaatttccctacgcactgtaatgccatgttttgattctccatgttcatttgagagttcaccaactttaaattgaattttttactagtatgctgatgcaaaaatttgtacaaatcaactggttctctttcatcatcacaatatatttatgactaacaaaaaattcaaaatttgatattgctctctgcaaattgattctcacaattacacagaataagagattcattcaaaccacaacaactaccagatgctcgatcaaatagtctataaacaagttaatgaatacaacgagggggagaagtacaagaaacgaaaaatacttacagacttccatgatcttatttttccatacaaaccaatgcactgagttccatataaatctttacaggaagctgaacagctcaaagttgtcgctccaccattatcaactttccaaacagcacaatttgcctgtagattgatttacaagagcatgtgaaaagattagcatattaactattgcactttcaactcatttataatgctctacaacctcaacctagactgacacaagtcaaccatgttcaaatatgaaatgaaatacaagtgaaaaactttgctgcgatcatttatgtccaaaaactagaagaataaataatcaaagcaaaaaaaaaaaaagaatacctcaggcatttgaaattacgtagctatagaatattaataaattgaaacaaatctacagagcagaaaaaataaaaacagtggggaaaaaaagccattaacagcaaccaggcccaagaatatatttaagaatacatgaacacttaaaactccagagcatccactccccaataatagcattgcagcagcaacatttttagacagcaataaagagaacaagttcataatttatctacagtctaatgcacgataagttaaccttcacacagatcagtctaaccaagaaagaaaaacaaaccttgtatctcctgtaccgtgcctcattatttcccaaatgtttcttaataaaaaaatctgtcaagaaaccagcaagtccatctaagagccactctgcaaattgcaaagcatttagcaatcacactagaggaaacataatctgttgaatttacaaagaaacaaatcaaattaaaacaacaatcaaaatatcctctgataagttaccatcatttggtgcctcaggagtgatgtacacaccaaaccactgtcttgcaagagcatatgcaagttttacccttgtatcaatagtctgtcaacaaatactaagaccggtcgttaagctggcatatcataagaaaaaaacccttgtgtgcaaggaaaacaatttgttattcattcagaaaaagattaattagaaaaaatcaaaaatcaaataaaataattcaagtagtgaactgacctggtcaataaccttctcatcaaacaaaacttgagaactaaatacactcatggaggctcctaaactcaatgatgacattgccatctctggctctatgaaaacttgtgtataagagtcaaatgggaagtctacagaaagataatccttatagcagctgctcaccaataaaaatccaactatttaatcattatacaattttatgatgaaaaaaactaccagtttcaggctagttaaattgcagctatcacatgtcaaacctaaaggtattgtggaaaaaatccattgtattccgcatctttgacagattaggcagcgaacacatatgtgatataaggctaaattggtgatcaggaagaatttcaaatggggcaacagccaaagttatccaccttgcagcactggaacatccagtttatagatatatgttttctgaggaggattgtccttgcttaagacctgaaaaataaaggaggttacaaatttaactttgcaaggcatataacccattaaattttcatatagaactagaaattttattagagacaaaagtgaagaattacaacaaaggagaggatagaaaattccctaaaatgccaggggggagcagaatagggtatcatacatagtttatatcccattgtatgtagagaatagaatcaagaaaaggaaaaaatcaataatataattttgttttccaacttggacaaaaagaattcttcctttctgtttctcttccacgaaatggtagtagaagaaaaagtgtgatgctgcttcaaatttttgtgaaaattaaatgaactcttgaaaacgaagctaaataatacacgccaaatcccttggataagaaatttggccaacataaatccttgaccctagaggtgcggtgagcatggattgaacatgcaaccttcagatcttcaatctgacgctctcccaactaagcaatcaccgcaaatgtatgccaccaaccagaaaccaatatccagcccagagtgttgcagagttgcattaactacccaacaaagtgataatgataaccaaatatggctcactgagagtaaacctgcaaatcaagatcagccacaaattggaatccaggtcatatcactatgtcagagttatgtcaaaataacagatacaggaacagataaggttatattttggatgaatctaatcattgaagaaaaagaaaacaagaaacaaggaaaagaagggggaaggttgcatccaatccaaagaggaagaggaaaaaatagaaaatagcaggttcaatccttgaatgttttacagggactcacaatatccaaaaacataacttactggaaaagcaagtagcaattcaaattgtacaacattcttcctttatttcaagggtctagttaacaaattatgaataaatagattggaaaccacaaaatgtcgtgtataaaaacaaagccacaacaactatttcactgttttaccagaaatctcaagcttaagtattaggcagcaaaagtgagcaacactaaccatccaaaggaaataactatttccaatatttacaaaattagcgattagcatttttctacagttctatcacagcagtcaaaatcctaccattttcaacaatgaatattcccaaagaaaaaatattgattgaatttgaagcctatcgtcatctaacatctgtcgattataagaaatgagaaaccaaaagtagccatactccaattgcccagttgttggaaacaaaagaaattccaattcccaacctgacttgacttgacagaacattaatgtgcttatcaacaaaatacagctccaaaatattatcagcttgttaaaaaatagtatttctcatgctttcggatctaaaataatagaacatcagtatcattcattactacctgataaagcaagcttcttgtactgacagccacaagattgtgtgctactgtgaactccaggtcatagctaaacatgaataaaacaacaataattacttcaagcattgaacagtaaatattgttattataaatgtgagcatggacctaatatatggctacacacaaatggaaagagttaataattcataccagcatcgttgtgaattgtcatctatacatgggaaccaacaccttgctctccttatctggttatcagtatgaagaagattatttctgaagtgtattactgtctctgccttctctatccaatagtcaatacaaacagttctcacattctgcacccaacatcaacctacatgagaaaacaccaatagtaaacctcaccaaaactactcatttctcacatttcactgccatgttttcagggatggatactacactattaacactcaaaaacaagaacccattccttacaaatgagtaggcgaaaaacacagatattaaaaggctaaataggcagaatattttgaaaaaacacaataaaacatcagccatggtgacccattataaataaatagaaacatgcaatatcttgataaaacatgtgaaaaatccaagcagaggagaatgttcataaattaggttgttagttgttactatggacttaggtacaaggttttgaaaaatcatccgcaactacaatttcagacacatcaaggtttttgaactctgcaactgcataacaactgcaattgtggcagcatttgtctacaatttccctcaaagtcaaggatgcaatcgtacatcaaggtttcttgctagtaatttcttataaaaatcacatcattcttaccattgactaggttggagaaggttagatatggcgcaatgtacttcatgtcataattgtaatcacaagaaggcaattttcacttctttgaagtcaaatctacatgtagtatacaaatttcaaacacttttaaccacataataaatttacaggtcatgttttggtaagcagcataatgttgattttattttattcttttaaaaggcaaaaggaaataaattctttaagaaaaaatgactatccttcaacacaagatgagttaaaagaagccacctaaatgagtacaaaaccatagcattggtaaacagcttagttaactatttattcaataaattcttatcaaagaatatatacaatctgttcattgatgatgggctgattacatccttaacaaaaaatacctctcttcactgcctgctgggtttgacattgcctcctcctctacaatggaacccattttctcaacttttcttctctaacaaaccttcaattccaccaatgacaacatgaccatgtcccgaattcaaagcaccccaaaaggccacttcaacattcacttattttatttactttccagttgctttgtttgaaacttatgttgtactattgcttggatgctatggaagataagggccacctgagagaaacaccctgtaaccaaacacagaagaaccatcaacaccatcaaagaacaactacaacaaaatccaaaaggacttttctccaaacttgaaaaacaacacacctgaaagaggcaaacaatgagcgacagtaacaacaaccacacacaaaacaaccaaaaaaaatcttggatcataaaaaatgtgtcttcaacaagagcagcaagaggcccaacatggaaaaattctcaaagatgaaaactttccctttagaagatagtaaaacaccattttttgcctccaaaaccaaaccaaggcaccagaagacacttcgaaaatggcatggtaaacaccattttggaagagaagtgatgggatcttcctccagaagggtgtcgatgttgaagtccttcctccatcgtccttgctgcattttagaaactctttctgcatgcgctcaatagatggggagaacaccaaaatagccccttcaacgagaagaaaaagaagaagaataaattgttccttgagcagctttagccccacgtctccgagcttctccgcaatgagcaccatgggcttcgcgtcaagcccggctgagacaaccagcacgagagggagggaaccgcagtggcaccagcggagagagacagagaatgtggaggagagggacaacttcgacaagagagtgaagaagattggaattgaagggtttggagagagagtgacaaagaggcatgaatgagaagtgtacatatttaaaaatacaaagacttttgaagacggttttaataagaccgtccttgaatattctatatctaagacggttattataaaaccgtcatcgtacatctcgttttctttacaaaattgccaccgcattctatttaagacggttcttggggaaccgtcgtcgttttgctgtcgtaatatatgctttttgtagtagtggataatgattctgttatgaacgttcattcaatttcattagaagcagttcatcgaattaactcctaaattaattgaaatcacaaacctaattgaaatatcatccaactaatttgtgattaaaactcgaaattaggaaataaatccataacctaatccgttttcaatcctaaacacattcataatcatgaaaattgaaagaggattgaagaagaaaatgaacattcacacagaatttaaaataccaaatcagaactcaaatttccgctttgcttggactgaatccttggattgattgattgtttagccttcgatgatcattatcaatgaaagccccatgaaattggtgcacaaaaatggaagaacaaaaaacgaaaatgaagaacaattgagagaaaataaaagaaaggattttgattctgaaaacttaaaaaggaaatgtaaattctgtttttgctaaaatgtagtgtctcatttactccttcattcactaacatatagtgactaagtcagaaggaaataatggaccatgaatatgtctatctattctaattaattatgttatttacaccaataaaaattcaactcgtagcccaaaattcaagtgcagtgattctaacttcaaagcctaaaatgaccctccaaatgacagaattggcatcggcttatctctgcgtacactgggtctcttattcttgcaccagccttataaaccatgctggccactgcatcagctctttgagactctggaagttcctagaaaatgaagcaaaacaatgacatcatcaataaagtactttaatattttaatgtattttcattggtcatacaatacgtttaaagtgtgtaaaaaccataaaagggtatatagaatatgtaaagaagcaaattctcatagagtaaaacaaaaaatttgattacttgattatgaaaattaattttaaaaagattatttggttacaaaatatttgtatgtgtcaactgtgttgtcttataatattgaccgatttcatgttagaattaaggaggcccaccactaggtttcgttaaaattaggtcactgaaaaatgcatttaattgaagcattaatatgctatgaccaagaatatgacactacagactgcgttggtcctgctgggaaagagtggggctgattcaattcaccaaataaataaaggaacttagtacagtactattgtttgtgcatttgtgaaaaaaaattgggtgaaattttttaaggatgtaaaataactgattgatgtaaaataaattattgtatcatgttagaaatatacacatatttctttaatttaacataagttttatatgtatcaaaggttaaataataagtcaaaggtaaaaatttccgaccaaaggaaagaacgcaaaggttacacatatgctattacaattattctctagtcatgtacattaatttgtcgtctctgttgaagtttcgtgggatcgtgtaaaattaggtactccatacattggagactagtcttatcatctattaatttgtccccggggacacggaacaatatgcatagaaggatgttggggaggtcttctgacgggtggaacagttatttttaccactctataatgcaacgtttgttaccacatcactgtttgtgtctgaaatcatcattgactcaaaaaggaaaaatcacgtggaaaatctttttagttagagaatttaaagaacctgatgcagagtgtttgataacattatgcagaaatcatgatgtcattaaactatatcatgtcacatatgcgatgaaatgtgtatatataatatggtctctctaattgtcaagatatgtagttagtcttaaaaaatttaatgaagttgagttgagaaaacatgaaagtgaaataagattttgtaggccaacataggtagctacctgcaagaacttgatgatgttgctggcaccgaagacttgatgtgcagtggtaaacttggcaggttcaatgggagggaaataaggtgccaagacacatttctcagcacatcttcgcctcagaatcttgcaagcagcacaagggatcatgacaacttgaacttgttggggaggggaagaagggttaggatttgatgttattgttattagttaatttagaattggaatatatccaattgcacaagggtcaaaatctaagtggtcaagaggaacaatataatctactacaactgcacaaaaaccaatttaaacagaatctgtatgataagtattagaaacagatgcaaagagatgaaaggatccgagtccaacaatgttgtctccttaagacaatttgttccctccaattgatgccaaaggttgatgaacaattgtctcccaggatagaatggatcaatgtctgaagaatgatgacacttcaaatcaacagctcaaacgaacaaagctaatgcttgaggaaccactcaggaacagtgaagagttatgtgatatgaaaatgcactagtatctaagcgagaatatcagaaaagattaactatcaaaactctatcagttttcttttctattttatgactgtttctgtatctatttatagacaacaaacaaccttgttgaagagttgtcggtaaaccatcgcgactctaggtgatgaaccatcgcaaccgtttgttatcggagcagtttggagtagttattatttttctaacctttcccaggagcagttgggagtagttattatttttctaacctttttccaaccgccacgtattcataacccatggagtttaaacaaaaactccaacaatcccctacatgaataagagatcaattcaacatgactaaatgcatatgaatatgtatgcaagtgtgattcctcggcgagaaacaattgcatcgagataggtaggggttacctttgaaccttctctagtgtaaacctatcgtctatactaggtcaatcggtggtcgtgatgccttgaaccgtaaacctttatggtgtataccgagacaataggagacacacaattacctccctagcattgctcgtcctcattgttgtgtccattttggccatggacaccttcctggttctgcaagtgttgtagagaatcggcctttttaagttctcattgaagcggccctcacttcacactcacataggtgatttcttgtgatatactccacatacatcacctgaaaacatcagattaagaaaccattaaaagctgttatgcttaccctcatatacactatattgtcataggaatgagtatgagtttaaaaactccatagtgtttaacagtcgatcatgacttagttgtctctttgaacctagttcgtgggatctccactcatcaaggtagagttaccgcgatgatcaacaattgataggccttaaacccattcctttcgacaaattttcaactagctctctaggaatccctttagttaatggatctgctatgttctctttagacctcacatagtctattgagatgattccattcgagagtagttgtctaacggtatcatgtttacgacgtatatgtctagacttgtcgttatacaagacgttcttagcccttccaatggcggcttggctatcacaatgtatgcctacagctggtactagttttgaccaactgggaacatcgtcaacaaaattacgaagtcattctgcttcctcaccggctttatctaaagcgataaattctgcttccatagttgaccttgcaatgcaagtctgcttggacgatttccaagatacagcacccccactaagggtgaacacatatccgcttgtggatttagtatcattagaacaggtgatccaatttgcatcacaatatccttcaataactgcagggtactgttcgcaatgcaaaccaaagttttgagtgtgttttaggtatcctaaaactcttatcatagctttccaatgatacacgtttggattactcgtaaagccactcaacatgctcactgcataagcaatatcaggtctagtgcaattcataacatacataagactgcctaatacttaagcatattccttttgtgctttagctttgccagtattcttcaatagtcgaagactagagtctatgggattattcacaggagttattattaaactcttgaatttttcaagaattttagcaatatagtgagcctgtgataaagccaaacctcttgatgttctatggattttgatacctaaaataacatctgctcttcccaaatccttcatgtcaaatttgttggcaagcaattgcttagtagctttaatcatttgattattactacccattatcaacatgtcgtctacataaagatagactatgggaaatgtaagattcctggtttgaaagcttgtttttagccttttctggggttccacgctggaggcgtggagtgccacgcctggggcgtggaaaaatggcctgaaattccattttccctggaagtccacgcctggggcgtggcatcccacgcttggggcgtggcagcccacgcctggggcgtggagtccacgcctggggcgtggagaggcaaccagacagcattttcttcctgccagtccacgcctggggcgtgggagtcacgggaaagttttataaaaggagtttcaggcttgtttctgggccatttcacttcctttctcttcctcttcgtccctaacctccatagaagtgattccaagctttttcnnnnnnnnnnnnnnnnnnnnnnnnnnnnnnnnnnnnnnnnnnnnnnnnnnnnnnnnnnnnnnnnnnnnnnnnnnnnnnnnnnnnnnnnnnnnnnnnnnnnnnnnnnnnnnnnnnnnnnnnnnnnnnnnnnnnnnnnnnnnnnnnnnnnnnnnnnnnnnnnnnnnnnnnnnnnnnnnnnnnnnnnnnnnnnnnnnnnnnnnnnnnnnnnnnnnnnnnnnnnnnnnnnnnnnnnnnnnnnnnnnnnnnnnnnnnnnnnnnnnnnnnnnnnnnnnnnnnnnnnnnnnnnnnnnnnnnnnnnnnnnnnnnnnnnnnnnnnnnnnnnnnnnnnnnnnnnnnnnnnnnnnnnnnnnnnnnnnnnnnnnnnnnnnnnnnnnnnnnnnnnnnnnnnnnnnnnnnnnnnnnnnnnnnnnnnnnnnnnnnnnnnnnnnnnnnnnnnnnnnnnnnnnnnnnnnnnnnnnatagggagatggcaattcctcccaggagatggcaattcctcctgcttgagacatagatagagagatggctattcctcctatcatgtggtattactctaggagatggcaattcctcctactgcatagagtttcgccccatatatttgatatatatgattttcagagagcctgatgtgctcggccggcgggccagttgtttgtgttgcttgtgtatatatatgatagtgggccagggtggaggagattcctccttggatcctgagattactgagatatgttatctcaccccgtgtggggtttatgttgatttcaggtgatccttctggaagagaagagcagtctcagggcaagaggcccatcagagactaatctgcttagtggaggagcagcatagagggcttgtaggctctattttgagttatttgatgtatagttttgtatacccctctaggagggctgatattcttttggtagcaccgcgtgtggtgtgaaactgttatatgtacagaactttgatatattttgatactctccctgaggatatgtatatacatttgtgttgatactctgccttagtttctgcaatctattttattgttgtgggtgatgagaaactggatcagcaggggcgtgatttatgattttgtctatatgtttatgtgtatccatacataatgtatcaagaaaacgatcctatgcttccgctattgtttataaattggttattatgcgctaatctgatattattaatgataacacgtcggaggcctacggggtgttacagcaaaccctttatcactattttaaatgtagacacacttgtcacattcattaatactaaaaccgttcgataacataactttatcaaactttgcatgccattgttttggagcttgctttaaccagtaaagggatttaattaagtgacaaacttttcgttcttgtcctggaacagaaaacccttcaggttgttccaaatagatctcttcttctaggtctccatttaagaaagctgtcttaacatccatttgatgtagttctaacccatacaacgctgctagcgtgactaacatcctaatggatgtaatccttgtaacaggtgaataggtatcaaagtagtcgagacctttgcgttgcttatagcctttgactacaagcctagatttatatttatcaatagttccatcttccttttgaagacccacttacttcctagaggtttagtgccaggaggaaggtctaccaattcccaattcccaagtgtgatttgacaggatggattcaatttcactattgatagcctcttcctagaatggtgcctctggggacgttgcagcttctttatatgtctgaggctcattttctaacagatatgttagaaaatcaggtccaaaggatgtggtagtcctttgcctcttactacgtctaggttcttcctctacaggattaacactagttgtagtctcttgagatttcacaacattatcattgtcattgccacttggttcatatacctttttgtatggaaatatatcctcaaagaacctagcatcccttgattcaataattgtattaacatgtatatctgagacatcggatttataaaccaaaaattgactagcactactattaagtgcataaccaatgaatacacaatccacagttttaggtccgatcttcaaccttttggtttaggaaccgcgaccttagccaagcacccccacactttcaagtatttcaaggacggttgctttcctttccatacttcatatggtatgctctttgtcttcttgtgaggaactttattaataatatagtttgcgtcaaaatggcttcctcccacaagttctgtggtaaaccggacgtgattaacatagcgttcatcatttcttttaatgtccgatttttcctttctgcaatcccatttgattgcggtgcataaggagcagttgtctgatgtataaccccagattctatacagaactcctcgaaggggccatcatgttctcccccacgattgctccttatagccttaattttcttgttaagttgattttcaacttcatttttatattgtctaaaagccacaagtgcttcatccttactattaagtaaataaacaattcagttgatctatcaacagaagaaaaaggtaattttgaaatctttgattcaacacatacttgacatttagtattagaacattcaactttaggcaataaatctaaattaaccaaacttttaattgatttaaaattaacatgtcctaatctttgatgccataaattagaagactcaagcaagtaaacagaagtaacattattattaatactaacaccaccattggttacagtcattacattcatcttaaaaaggccctcactaaggtatcattttcctacatacacatcattcttagtaagtacaaacttatcagaaacaaatacaagtttaaatccattcttgctcagaagggatccagacattaagttcttgcgaatatcgggcacatgaagcacatcattaagtgtcacaaccttgccagaagtcatctttaaagccacctttccaataccttcaacttttgaagtagaagagtcacctatatagagtttctcatcattcttcactgtggtgtaggaggaaaacatccacttggatgaacagacatgcctagtggcaccggtatccacccaccactccttagtgtcccctacaaggttacactccaacaccaccgctattaagttgagattttcaatttctccacaagcagtatcaaccaagttggcttgagtagtcttctttttggatttctgtgactttttgcaatcctttgcacggtggccaggattaccgcaattgtagcaattgcctttacctttgccttgtttagcatttccaacatcggaattgtctagaccattgaggatgtagtttttgcataggaaatcagagtggttccatgcatcaacctcaacaaccttctctttatcatgttcatctccttctttcaacttcggagcatcttccttgagaaaacgttccaaacatagggttgtcaaatagaacaacattttctgttgccaacgcttgaaagcaagcccattgaatttttcaggcttttcagcaagagttgaaacagagggagccttgttgttgttgaccaagtttgcacttgtcgaagtcatttctgttacacaaacagaaacactgattaatcacacagattaatcgttcaaaagtacagagagtagacaacagtatataatacaaaaagatagaatatactaaacccaaattcaaagcaaattgtcttaagattgttattgttattagttaatttagaattagaatatatccaattgcacaagggtcagaatctgagtggtcaagaggaacaatataatctactacaactgcacaaaaaccaatttaaacagaacctgtatgataagtatcagaaatagatgcaaagagatgaaagaattcaagcccaacaatgttgtctccttaagacaatttgttcccttcaattgatgccaaaggttgatgaacaattgtctcccaggataaaacggatcaacgtctgaagattgatgacacttcaaatcaacagcccaaacgaacaaagctaatgcttgaggaaccacttaggaagaatgaagagttatgtgatatgaaaatgcactagtatctaagcgagaatatcagaaaagattaactatcaaaagtctatcagttttctttgctattttatgactatctctgtatctatttatagacaacaaacaaccctgttgaagagttgtcggtaaaccattgcgactctttacgatgaaccatcacaactgtttgttatcggagcggttgggagtagttattatttttctaacctttcccaggagcggttaggagtagttattatttttctaacctttttccaaccgcctcttattcataacccatgaaatttaaacaaaaattccaacatttgaagagtgagaaaatgtggtgtttgtgtcactctccatcaatactttgttgttttgtgtttggattctactttgtgtagtttagggacaaagagagaagaagggtgtgaggtaagtgtctgggttgtttggaagccaaaactaggggttttataaggaaaggaaaggatgataatgagatagcaagcgtatgaaattcgttaataactggctgcgtgctgtcttcttttcccattctctgttaggtgttgtgattatgatgtttcttttggcttattgtatgaaaacttttaccaacattgaaaaaatcgtttttctatattctgcttgttcgttcctttttatttttcttttctactttaatgcaaataataataataataatcacttcaacttggacccttgcatatggatgcaattttagtacatatattttccaaggaaaagaacattatctcatgcctaacagcctaggcctagtaaagtgacttttcctaatgagtcaaagaaaaagaaaccggtgagcaacatgtcctattcaccctccagtaatttcttacccctagtactagtacttcttattccaacccaaaaatccgattaaaatgcttaagcacgcagtaatttcttattaatacttacagtacataacaaatagggtagattggacattatggcattaactacacgtccccattaatttgtttttgtttgatttaataatcaacgcaatgtatgtatagcaccctaaagggacaaagaaaagtaaatatattctctcatttagacaaatatttggtttactactggtctcgtaaatttttaaaagataaaagaaataaacgatagaacaggacttagtagtaacattttacctagttactttcattgacgcattgaatgacggaactgaaatggtataatcacattctgtcaagtatgtgcgcactcgcatgtgcgggtgagtacactacttacgggtccagtctttttaagttctagacttctagttcttaacttctggttgatgcaaatcaggacaacatcaacatggcccacaccatagttactgcgtaaagtttggtacgtaataatgatgtaagaaatacgaattgcgttcctatataaatgtatcgatcgcattcttgtgtcatttagcatggtttacgcggaacttcttgttgccttatgccggcaaagtcttcaaggtcaatggtcaccaactcaaaacatttcatgagaaccctcaagtggaggaggagcttgtggaggacatctctttggtcctgccaattttgcttgaatgacattttgagagtttccttttcccttcttttatttgttgtctctttgttgcatttctttgcatgcttacattgaggacaatgtgcatttcaagtggggggtgaaggatcctaaaatttttgaaactctagttattttctgctttctgtttgctgtctgttttctattcatctgtctacctgtttgtcagtgtctattattttctattttttgtttatctatctgtctgtgttctgtttgtctgttttagtttttgagtctgtatatttttattgtctgtttctgtttgttgctgtttgttgctgtttttattgaatttaggcactttttcatgtttttcataagatttctaatttgcataaattgtgagaaatgttaaaaagttggttggattgagaggtttcatacttgatgtgaatcattgttgcaattgttgaagcgataagtaggcttcagaaatagaatttaagatgagccatgtggtagaattatgccttgtgagtttttgaacctttgtgaatatgttctttcatgtgtgatttcacccttgtgctagattactctatgttttgtcttgcctcttttgacattccttgttgcacatgctttgattgagatgatttaggccttctttctattagctactagccaaataaacctatccttgtgttgatatccattgtcaccctctttgagcctctagccttttctttcttgtttagctcattaaaaacagagaaaaaaaaattggaaaaccatgttaccctagctttagggagaaaaggggctttggaattgttttgggagtgggtttcaaacaagtgtggggtgtttttcttttgttttgttttgaaagaaaagaaaagaaaaagagaaaagaaagagttcaaatagcaannnnnnnnnnnnnnnnnnnnnnnnnnnnnnnnnnnnnnnnnnnnnnnnnnnnnnnnnnnnnnnnnnnnnnnnnnnnnnnnnnnnnnnnnnnnnnnnnnnnnnnnnnnnnnnnnnnnnnnnnnnnnnnnnnnnnnnnnnnnnnnnnnnnnnnnnnnnnnnnnnnnnnnnnnnnnnnnnnnnnnnnnnnnnnnnnnnnnnnnnnnnnnnnnnnnnnnnnnnnnnnnnnnnnnnnnnnnnnnnnnnnnnnnnnnnnnnnnnnnnnnnnnnnnnnnnnnnnnnnnnnnnnnnnnnnnnnnnnnnnnnnnnnnnnnnnnnnnnnnnnnnnnnnnnnnnnnnnnnnnnnnnnnnnnnnnnnnnnnnnnnnnnnnnnnnnnnnnnnnnnnnnnnnnnnnnnnnnnnnnnnnnnnnnnnnnnnnnnnnnnnnnnnnnnnnnnnnnnnnnnnnnnnnnnnnnnnnnnnnnnnnnnnnnnnnnnnnnnnnnnnnnnnnnnnnnnnnnnnnnnnnnnnnnnnnnnnnnnnnnnnnnnntctctcacttttgtgcattgttatgatccactgaaaaatatgtgtgccttgttcatacccgttctttaaatttttggtttactttagtttgaatttttctcttagtctttcttttagttttgcccaggagtgcaaaagtttaagtgtggggtattttgatagagtgcttttagttgaatatttttctatccttcttagcttatttgacctctcttggacctttattttcctattctaatccagttttgggcctaggcaagtaagtgggcttaattgctaattgttgcttatttttggatttttgcccacttgacatatctggcttgtgcaggatctatagagtgctaccgatctccgaatggagcgttctaggagtccctgaaaagataaagaaaagatctacaagtttgatagaaatacctcgaggccaattctgtcatttagagggtcattttaagcttcgaagttagcacctctgcacttgtaattttgggctgcgaatttgactttcatggttgtaaatagaaaataattagattgttgggtttgtttatggcccattctattttcagaacttagtcactacatatattagtgactttagtgaaacttggacagcacactttacaattcaataaacaagttttatatttcttttctttagtttttagaatcaaaagcttgttcttcattttctctcaagtgttcttcattgttcttcatcttcttcatttccattttgctattcttccatttttctgcactcatttcatgaggctttccttggtgatcatcatggaaggctaaatcattaatcaatccaaggacctaactcaagcaagagaagaattggagttccggttcagtatttcgaattttacttgaatgttcaccttcttcttcaatttctattatgttttcatgattatgaatgcatttaggattgaaagtgaattaggattatggattcatgtcttaatttcaaatgataatcacaagattaattgaatgatagctcagttagggttgtggtttcaattaatttaggagtagaatcgattgaactgcttctattgagattgaatgaatgttcatgatagaattaacttatgagaatgatgatgattcgaattgcttgggttagtgaattggattgatgctttctcatctattttaccttactctttgataatcttgttaatttctgcattgttttttaattttagtttgtgttcttgcatgttttactttgcgcataccaactgttcgataaaatccccccttattattaccaatgaattgaagctagaaccatattgatcgtgtctctgagtcgacctaggttagctctgtgctacagaattagcttagtaaaattgtttttgatgcgtctcgacaacgtgttatcaaaactaaaagtaatatttccaatggtgcatgggacagagaaagtaccaggatccttgcactttggtggcaaggcggatagtgggatggcatcaacagctttaccctgtatcaatgcgaaaacatttctgcccatcttcacttgctcatttcccttaagcctcctcttgtggatgcacaagtccttcaagaactttgcatattttggaatctgtttgatggcatccaagaggggaatgttgacttccaccctcctgaaagtatcaagcagatcagaatcaagctccattactttctttgcaggaatggctctagaaggaaaaggtaagggaatctgttttggtgcagaatttgttttggcaccatcatcaacatttttactagcactagcatctggaagttccgtgccactcctcaaggtaatagcactcacattcttcggattcacaactggttgtgctggaaggttaccagaaccttgctgctgcatttggttgacagttgtagctaactgtccaatctgagtctgcaggtcctggatggtggcactgacattttgttgaaactggatattgctggttgccatttgcttcattaaatcctccaaggaaggtccaaaactagactgcacaggttgcggaggtgtaggtgcaggttgctgaaactgtggctgttgtctaaaaggaggaggttggtatttagtggtggcaggctggaagggttgttgtggaggtctaaaaggctgctattgttatgggccaggaccatacctcaaatttggatgatctctccaaccaggattataaatgttggagtaaggattatactgctgttgaggtctgaatgactggccaggttgcatggcagaaacttcagcaggctgttctgtctcttggagagtagggcatgcatttgtgggatgatcaggtgcataacagataccacagagccttggttgattggctgccatcacattctgttgttgcccaatagcaagctgcctcacaagggatgtcaactctgttaatttattctccaatctctggttatcagcaaccatagagacagaagcttcatttgctgccatcaccttggatgttgtaactctagcaccaaattgttgatagttggctgccatgttagaaatcaactgccttgcaccaagaggtgtcttgtccatcagagcacctccactagctgcatctatcatactcctatccatcaacattaatctttcataaaaatactgaatcagtaattgctcactgatttgatggtgaggataggtagcacacaacttgttgaatctctcccaatattcatacaaagactctccaggaaattgccttatgccacaaatttccttccggatggatgctgttctagaggcagggaagaatttctccaagaatcttctcttcatgtcagtccaagtggtgataggatctggttgaaggtacaaccaatccttagcaacaccatccatagagaaagggaatgccttcatcttaacataatcctcatgaacgttatggggtcgcatggtggaacacaccacatgaaactccttaaggtgtttatgtggatcctcaccagcaagtccatgaaacttaggaaacaaatggatcaggccagatttcagctcataactgacctcagtttcaggatattgaatacaccacggttggtaaacaacatcaggtgtagctaactccttaagagttaggttgtttttagccatgatatcaggatgtgtagaagtagaaggagtagaattagattcaggatcaaaatcagaagacgctatgctactgtctaaaactacactatcaaagtcatctaacctaaggttttgtctatttaatctatgaaatgtcctatctatctcaggatcaaatgaatggaattcacttgatgtggacctagtcatacacaatgcaactcataaaggataataaaaagcacaaaaacaatcctaaaaagtttatacaaaaactaatttttttttacgctggcgctattagcgtggtaggttcgggaagttcgcgcgatcggcgtgggatccgcgcgatcagcgtgggatggcagaacctacggtgcgactagcgccgggtctggcacgatcagcgtcaaatagccgaacctgtggcgcgactagcgcaggagctgcgcgatcaacgccatgacttcaaccagagattctgggttcgaattctgggcgttctgctctgtttttctgggttttctctgtttttatgggtttttctctgttttatgagcaaatacaaagctaatgcatcaactacaagcacataatcatgtaacaagcatagttgtgcaacaaaacgtaaaaatgcaagaattaaaactacttctatgaactaattgcaatgaattaaagctagcacacaatgaaccgtatccccggcaacgacgccagttttgatattgcgttgtcgagacgcatcaaaaacaattttactaagctaattctgtagcacagagctaacctaggtcaactcagagacacgatcaatatggttctaacttcaattcattggtaatagtaaggggggattttatcgaacagttagtatgcgcaaagtaaaacatgcaagaacacaaactaaaattaaagaacaatgcagaaattaacaagattatcaaagagtaaggtaaaatagatgagaaagcatcaatccaattcactaacccaagcaattcgaatcatcatcattctcataagttaattctatcatgaacattcattcaatnnnnnnnnnnnnnnnnnnnnnnnnnnnnnnnnnnnnnnnnnnnnnnnnnnnnnnnnnnnnnnnnnnnnnnnnnnnnnnnnnnnnnnnnnnnnnnnnnnnnnnnnnnnnnnnnnnnnnnnnnnnnnnnnnnnnnnnnnnnnnnnnnnnnnnnnnnnnnnnnnnnnnnnnnnnnnnnnnnnnnnnnnnnnnnnnnnnnnnnnnnnnnnnnnnnnnnnnnnnnnnnnnnnnnnnnnnnnnnnnnnnnnnnnnnnnnnnnnnnnnnnnnnnnnnnnnnnnnnnnnnnnnnnnnnnnnnnnnnnnnnnnnnnnnnnnnnnnnnnnnnnnnnnnnnnnnnnnnnnnnnnnnnnnnnnnnnnnnnnnnnnnnnnnnnnnnnnnnnnnnnnnnnnnnnnnnnnnnnnnnnnnnnnnnnnnnnnnnnnnnnnnnnnnnnnnnnnnnnnnnnnnnnnnnnnnnnnnnnnnnnnnnnnnnnnnnnnnnnnnnnnnnnnnnnnnnnnnnnnnnnnnnnnnnnnnnnnnnnnnnnnnnnnnnnnnnnnnnnnnnnnnnnnnnnnnnnnnnnnnnnnnnnnnnnnnnnnnnnnnnnnnnnnnnnnnnnnnnnnnnnnnnnnnnnnnnnnnnnnnnnnnnnnnnnnnnnnnnnnnnnnnnnnnnnnnnnnnnnnnnnnnnnnnnnnnnnnnnnnnnnnnnnnnnnnnnnnnnnnnnnnnnnnnnnnnnnnnnnaaaatgaccctctaaatgatagaattggcctcgggctatttctatcaaacttgtagatcttttgtttatctttccagggactcctagaacgctccattcggaaatcggtagcactctatagaccctgcaaaagccagatacatcaagtgagcaaaaatccaaaaatacgcaataattagcaattaagcccacttacttgcctaggcccaaaactggattagaataggaaaataaaagtccaagagaggtgaaataagctaagaagaatagaaaaatattcaactaaaaacactctatcaattgcgttcctatataaatgtatcgatcgcattcttgtgtaatttagcatggtctacgcggaacttcttgttgccttatgctggtgccaagtggccaaggtttggacataacagttgggaaaaacggtttgtttcaagtgagttatcggggttgctgccaccaatgagaccatgctatctacttccttaactaacacctaatgaccatgcatgccatttataatttattcacaacatataattaattaagtgtctcttgcagaaaattatatgtatgcatgtctgtgtgatatgcatgtttgcgcaagatctaataggtggggcaaggttggtggagctcgttgaacacacaggaaaacataaacttgttataatcaaagtcttttatcattaagttgcaacttttcaaatcattgaatattgctccggttgatgcctatttgttctagaatgtttaatggtctttgttcgattaatatccataattaagtttttaagcataataatttacataatgatgatgacgacgataataagagatgaaaaaatagattgacaaaaaacaaagggataaacttgaaggaataaggagaaaaaaaaagagagacaaaattaagagctaatttgaaaaggaaaaaaaatgagctaagttagggagaaaaaaaaaaggtgccaaaaggaagacaggggtgccctaatttctcccgtattatctatcaaaggagtcacgcaataaaacactttgtaaaatactttccatcataatattttcagttataattttaatgcactattctcataaaacacatactatggggaataaatttccttcagaacggttattcagtcacccatttcatattataagcttgataacatgttcaagaaaatggttatcatttttcgtaatcctactattttgaagataaactagattaataagtaatccttcttaaaatgcatagggtgcaattgtcttatatccactcctaaattagccactgaactttaatttttgaaaagcaactttatttcagatatctaacactattttagctttagttgaaaaaaagtaatttatgatgaatttaatttttaatatttaattgctgcttctggccccaataccatacattataaaacactgaaaaattagttctaattactaatatttttaggatggtgtttctagtttatctccaagtgatcaagttttcaacgcgttaggggaaaaatttgagttgagctttcaactttgccgtggaagtagttagacttttgtaatttgtaacatttttctttcccattcgctcgtgttagccctgtcttagagcgtgtggaccttgagaaaagaaaagcaatagccgaattcactttacggttcactcccactatagcctgtgtttttttttcttttttttccttccacgtatataagtactttcacattaattttgaagcagtagaaagttttgacccaaagcaatttgatcaaattttttggataaccatgctatttgagcaagttagttccgaaagtgtcctgctcctctgtgcatcctttttggcacacgtgtgctaaatgtgacgttttcttaacactcctgtaccgttgtagaaaatcttgacaattaaggacttttaagttttaacttttttaagtggtatctgtaagtggttcggtataatttttctaaacattaaggattgtgtattgttttaatggaacttgcccaagtacgatacagtagacttagatcttagacatgcttgagtgtaagcgtttttaaaaatacttttatggaaaaaaataaaaatgaatttttcaataatctaaagttaattttttattaattaatttataaaaattctctcatataatttttctaaaacatgaaagtacatttataaatgagttaatagaaaactaattttaatttatgaaaaaatttatttcatttttatcttcttatttttttctcctaaacatacttataaagaagcttattcaaacatatttcttattaaactttctcatttgaacttgagtcatcctttcatccacctaacaactaataaaaataattataaaattatagggatattgtaaattactagtgtccaacccatgaatatataatttggtatttgctcgcaatattatcatgtaatgcacaatcatcaaaatggtaactctatccaattccttgctaatttatttaaataagtagttgacgagttatttatataagccaaaaaaagaaatattaagtgagaggtagccaacccttttacagaacagtgagaacatagttaacctgccagccaaaaaacagcactgagctgctgttagcctgttattccctcgtcacatgtagtatgactactattcttacagttagctataatcccttcaagtattctatgggattaattctccattcatgaaaagaaaaggataaattgttcagcctactagctagacagccaagtccaacaagatctatatttcatcaaaattgattagcctggttacaatactcagagattgatatgtgcttgatactttaacatatgaattattcaaaataatctcacatttttataaattctatgatgttgagttccattcctaagattaaaaaattgcatgtcaaaaataacttgcattaacttcctcctttgcctcatgaaaaaaaaaaaaaaaaaaaaaantacttctctactcttcaattactttaataaacactttactatttatatgttatgtttaactatttatttctacctagtataagattttccagtcatgtttgtcagtcattccactcaccaagtatgaatctctttcatgtgatatcctattcaacataatgtaaaataaagttgttacacttgttagttagagtcatttatttcaaacttaggtagaattttactttaatacaattaattttaaactctcataattaaattgtgagtgtaaattattttaactttaatttttaattttcatattcaaatatgtatgctgatcaagaaattaactcttcgcgtaagtcaaacaattctaaagctaatgcctccacctattcttagtgttcttgttctagaagcgttaatttgggcccaaacgattaaggctattagaaacaggcaatagctgctccaaattcctataaattgcgcacttagaccgctaatatgtctaatgattgaaagctgacaaattgcttgtggaagccaagtatattagcttagctcataagctcattttttccaatacgattaattaatttgatttaggacctaggaccacggtacttaactttccttggtcctggcccttgaacgcgttttcacttttcaggtatcaattaattcctctaaaaaaaaaaaaaaaaagtatcannnnnnnnnnnntttaattgagtttggaaggctaggctacatgagaagtgagaacaaccagcagtataaaaatcctacatagaaaaaaaaaatctataaatatagaatttataagattcaaaatgtggactgttttattttcatttgtccctatggcctatatctattagagttccacccactcatgacaaaagaaaacaaacttgctgaagtttaacgaactttcgaaagttcttgaatttgaagtccattgcaattagacattagtactcgaccagaaacaatgttacaagaaaaatcaaacctcacgctgacttgcatttatctgtttacagcaaacagatacatctggatgacattggcagacccaaaatattttaccaggataacgaaaatagtaatttcaggaattagcttaacgaacacgggaggccttaagcactaattttaattgtgcaaaatagatattcaacatacataaagtatcagtcaactttacaatttaaccatgcaaggaatttcttcaaaacatacagtctatactacttaaccaataggggtttacacagctggtcaattcttccactcatataagttgtaacttaggttcaactctcgtattttttctgttgattggtgttagaaaattgatatagtctatggttgtgtttggtttagaggagagaaatagagtagatggcaataaaagagagataacttgaaaaagaagaaaaagagtagaatacatggggatattgagctaggcttgggcataacaatactgtccccgtccaaagcaaccttgtcctgagatcaagagactctagcttgggggcaagtgatgcggagaagatcttgcaatttttttttacagatgaagtcataaaacactaaaatcactaaagatttgtaagccataaaaagttttcttaaaggaattttatgaaagacccatatggactatagagttgctgaattggctacaaatgacaagaggtggaagattcaagggcaagttgtaccttgcattgataattttaaagggttaaaaatctaaataaaaaaatagataacatcattcaacctcattacagtgtttaggagctgaatttgtatttttaaaattaaataattaacaatagcactacaaaaaaaatgagatttctgacggaaaatttccgtcgctaatgccttaattctgtcgataataccatatttccgacggagcaaaatcagtcgctaaaacgggcgtaggaaaggtcattgacggatttttacatccgtcgataatgataccaatggaaaaatcggtcagaaagcatcatggaaatttttacgacagaaaaaatccgtcggaaatttcctagctgatttgtggaaatctttttcaacggaaaaaatccgtcggaaatttccttgcttatgagatttgtggaaacctttttcgacagaaaaaatccgtcggaaactgcctgtgggacattagcgacggaaaatccgtcggaaaatgtttttttttttaaattcgtttttaaatatttataattttttttaacttgtttgttattcatcaatatataagtaaatatttgctacaatgtttagatctaaaacatgcattcaattcatgaaatattaaaagaatttaatctcaaacaacttaactaattcaaagaaaactcataaaagcacaaaatcttataagtccatactaagcataaaattcaaattaaaaaactcaaaaataacagttgtgaagatgacaatcatcaactaattgcctagcaaaataatagttgtgaagatttaatgatcacacagatataaaagtttactatgtgtgtgcttaattaatgtgattcttctgttacctaagttggattctatataagtcataagtatattgtgcattggtacacaacagtataaacaaataatgctcctctttgctttggaaaccagctgaaactagtctcaaactacaaaaaattcagcaacccatttttccatttttctcatacatatataatatctacctactccattgtttaatacactgccaatgttgctttaagttggttttctaatatccaacaaaagtcagcccattgacaatatgaagaggagaatatagaggtaaaggttttgattcttacaaatcaaggagcatatcacacggcaatcctctccctgttgcaaactggattaatcctatctacatatatggttgaatattttatcctttgacctgtcaaataatggcattaaatattgcaaggtatatggtcagaagctctaaatcaacaccctacctttcccgttttttaatataatataacatttttaagtagatgataattaacctttttcttacataaagcaatatatatatatatatatatgttagtagcatttcctttttgatcaatacatatatgttagttttgggaacaattttagccaaaaaaaaaattacataagagtctttcttcaaagataaaaattacataagagtctaaatcaataaggtaatatgcttttggagacaaagcagctcattggccattgctgcccatgacatatctagaaattgaaataatattgaatttggtaagacacggttgataaccagagctgaaagactgaagaatgaaggacatatgtaaaaactaaatcatttctaaacttaacatcatcctaaaaaatttaatttggagaaacatgatcagctaactacttatattctcttttcgttaagtaaaacaacatttgaagaaactcccaacttgtaattttggtatagtgaaaggaactataaaacaactttcaatgagaaaaatatcaagaagttggtgaaactgaaccagtaacttggagcaaactttgagcatacaaaaatcactagtggtaacaagaaaatatcagtcccaaatttttagttataaaaaaatgaagctatttttacggtgatcaatgtcttgccttggtgttgcttttttttttttggctttttcattttcctagtccttttaaagctcacaacccttgtcaacattgttttatttttcaccaatgatactagatcaacgagcttataagctactaaaagtgtcaaacaccagtaagttttacaaccccaaaccaaataactttatgtcatatcactaacaatttgtggacacaacaaacttgacacttaagtttctttttacttttgtagtaactttgatttcatacgtcaacatacaaaggaaatgtaaatgttaagtttcttaagagatcaccgtgtaatttctagaaccttttcaaaaatgctaaccaatgtctttatattataacactagttaagaaattaatttaaaattttaaagagtataaatataggtgtgcggtggtttttaactataaataaagaaaatattattgattcttttaaagaaattttatattnnnnnnnnnnnnnnnnnnnnnnnnnnnnnnnnnnnnnnnnnnnnnnnnnnnnnnnnnnnnnnnnnnnnnnnnnnnnnnnnnnnnnnnnnnnnnnnnnnnnnnnnnnnnnnnnnnnnnnnnnnnnnnnnnnnnnnnnnnnnnnnnnnnnnnnnnnnnnnnnnnnnnnnnnnnnnnnnnnnnnnnnnnnnnnnnnnnnnnnnnnnnnnnnnnnnnnnnnnnnnnnnnnnnnnnnnnnnnnnnnnnnnnnnnnnnnnnnnnnnnnnnnnnnnnnnnnnnnnnnnnnnnnnnnnnnnnnnnnnnnnnnnnnnnnnnnnnnnnnnnnnnnnnnnnnnnnnnnnnnnnnnnnnnnnnnnnnnnnnnnnnnnnnnnnnnnnnnnnnnnnnnnnnnnnnnnnnnnnnnnnnnnnnncaattttacctatttcataatttcaaatagctacatatttatttaacaagcatgttcaagtatcagttattttttaaaacaaaaaatgaaattcagctaatgcattaagcattatagacattatttaaataatataaaaaatataatatattattattaatgttatttattttgacttataataaaataaaattattaacatttttaaatataaattgtaaaaattagataattaaatataaaaacaacatattaaattaattatataaattataaatagtgaacaatttaatattaaaaaaataaaaaaactccatgaatgacatgtttggaaggtcaaaagaatgaaaaggaatgaaggaaaataaataatattgttctcattatttggtattaaatttttacaaacataaagaaaactaaattattgttatgttttaaaattgttattacaaattttatgtcatactgtacatttataattatatattttgaaatatatatacatatatatccatctacattacaaatatagttatataattatatattttaaaattatagttataatgttatgtgtttgaagttataaggtgtccaatacaaactgaaaatataaacctagattacaaagaatatagaaatttgatctgattaacagaaaataacatataatcacatggagcaatcagggtcctattgcaatacacaagtatctcacatacacacatattgtaacttcaatttaaatactctaatgttcttaaatgcacaaggaacatctagaatgcacgaataaggagttaattggctattgatgttagagaacctctaatttccaatttcatttttaggcctaaaccacatgcgatgctattctagactcggagaattcttatgatgtgttatattcatatatctcaggttaaggattccaaaatattcaaccattatatatcaataataatttgaagctatattctaaaatacatctcaagcttggacaattaggcaaggcaaaccttatacaataaaagtttcaactattattgccatctcttcagcatgtttggataacataaaacagaataaaaatagtaaaaaagaactcagatttgagatgtgtgtttgacattctcctttttcaagaagtacaaaacaatttactaagaaactcacttgcaaaaagaaaatgcagaacaataactataagtcttaggtaaaaacaatcatattttgaaagttactacccacaattatcacatgaattcactcaaatatcagttggtataactcacacgaaatcaaacttgtgtagagcagcattttcctatatgaacattccataaacatgtgtaaagcatgggagactcaacatgtgaattataaaaagtaaaaagtgtttcaatcaatgtattagataagtttcgcattttcgaaagtatactaatgcagaaatggtaatctgttcaagtaactacataaaattataaaaccattacaacctcacactttctactagtgtcaaatacataaaaacagaaagtgtgaaaatcaatgttcaacaattcaattaatgtaaaatgttcaaattatacaatgactcatgttgctcaatttgcttccaggtgaggaatttttttctcaaccagtgaaaatgcatgagtttaaaaacaaaaagcagttaaaacccccctaagatgttcctaaactctgaatttaacatatagatacccacatatatagtatataattttccttcattttttggtcaggtatttctgatgaatagtttatcattaccctaccatacacaatgaaattaaccacattgacttaaaattatattctgcgggatcttgagtatgacgaatttgtgaggacacttcccaattttggccacttttttcacttagtaatccttgcacgatggctttctctctgctccaaaaccccacctttcttaaacttaaaccccaacctgaatccctaactctctgaatctctcctctctcatctccaacaccctcacgcatgttcattaaatccaacccacaaacatggtctgtaaaacacacacaccccccttaaaataacagcactaacctcatgcagcgtgtggaacgacggcagcagcaccacaacaatgtgcagtggaggcctcacaacctcgtgcaagggtggcgtcactgtcctcgggctcgtgctacggttgcataacgctggtgggggacagcctcgacggcattatagccattgtgagaagcctttcgctagatgcgaaaccaaaaagggaagtcactgactccctagggttgggtgttttaatttgggtatattttaaatttttgaaggacacgtgatgtgggtaaaatgcatttggaaaatgattttttcccacaaaatacccctctgtcgaaaattccgccgataagcctcacatttccgacggaataatatctgtgggaaatattccataggaaatacccctttttcttgtagtgtagatgttagatcaaacaagcatactttggatttaaaatctaaagtaattttaaaaaaaaaggtattttatttttatgatcgtttaattttgaagttgaaggatgatgatagctggatttcttctacaaattgaaagccatataaatgaaatggctaagcagcagcagcagcatcaactgcatgttgtaagattttaaaaacggaaataactattaagcagtagaaatccaaatactgcaaaatcatttacacaaaagcacaaatgttacatatcaggagtcaggacacagactacataaccttacatatctaatctggacattttactcaataaatgaaagcatcccaaagcaattcatctgccattcccaaagctagctgttggataaggttccgtttaatgctggcccaaatccctaggtgctgaaaaaggaaaaagtttgacttgggcccaattatcaaggtgttgaccttggcccatttccgtttacggtaaaatccctaaacctagttcatctctataaatatcacatttatagatggaggctgggacgattgaagatctagagagctgacgcagtgagcggcagagtgaccagagcaacaaacagagagtggtgtgtgtctccagcatcaggctgttgagagtgtctctaagaggttgagagtgacccttgttgagagtgtttccacatctgttgttagtgaggtcgagtgtctccggccagaggccgtcgagagtttgtaaccattattattgaatagtggattgtttctggactaggtcccgtgggtttttcctcttggaggtttttctcccacgtaaaattattgtttgtgtgtttttctccattgtctcttacgcatccttcgtttttgatcttttttcacgtttccgcatattttcgctgtttgttttggctgagggttgagtccagtgactccccagttgttgtggttggttggggtgttgctcccaaccgagaaagagaagtttgggtggtggcagaccacaacagagtggtatcagagcccagcatgaagggttctgagagagagaccgagatggagaccagtggaagcataacccatgacggggatatgtttaagttgaccgcagacaactttccatactggaggccgatgatagaagatcatctgtattgcaaggatttgcatgagcccattgttcttgatgagagatcggccggtaagtcggacaaggagtgggagatcctgagtcggaaggcggtggccacaatcaggaagtatattgataaaagcctctttgagcacatgtccgagttcactaatgcttatgatgaattgtggaacaagatgaagtccatgattcagaagaagactcccaggaacaaagctcacctggttccccggcttgtgaagctggagtacaaggacgggatgagcatgatagagcacttcaacacatataaaggtattgtgaaccagttgtccaaggccaatatgaagattaacaacgagatgcaggcgttgttgctgttgagttcattgccagagagctgggatactctgatagtgacgttgagtaagtcggcacctgaagggaaactggagatggatgtcgtgacagacaagctcctgaatgaagaagccaagagaagagaacaaggtgtaagcaacacgggcgatgccatcgttgctgagaggagtaggtccgactccaggggtcatggtaagagccggggtcgtgagagacgggataggtcccgagatcggttaagaccgaggagtgaactgaagtgcttctattgcgggaagcccaggcacaagaaggtagactgctggactctgaagagagatgagtagagtgactctgtgaagtcagaccagggtaagaaagaggcaaagagcaccacgcggtggttgccagtgttgggacagagatatttcttctcggagaagactttgtcaatgttgctttcgatgattgtacctggatagttgattcaggtgcttctttccatgtgacccctcacagaaggtttttctcctcttaccggagtgaagattttggagctgtgaagatgggaaatcaggtgaccagcaagattgttggtgtcggcgatgtgaccttgacttcagaagtagggtgtaggattatcttgaaagacgtgaggcatgttcctgacatgcggttgaatctaatctcgatgagaaagctcgatgatactgggttagtgaacaactttgagggctgtaggtggaagctatccaagggaaactttgtgatagcccgtggaaagaaggaaggctccttgtatgtgatgcaaggaagaataattggtggagaagccaatactgtgtttgatggatcaagcttggagatgtggcacaagcgtcttggccacataagtgaaaaagggcttgagattctggagaagaaagagctattgactgggttgaagggtcaagtgttggagagttgctcgcactgcctagctggaaagcagcaccgggtttcttttgtgagaccggatcaacctaggagacagaggtgtttacttgacctcgtccatactgacgtttgctccatgtcggagagatcgcttggaggaccgcagtattttgtctctttcattgatgaccactcccgcaaagtgtgggcttatcctttgaagactaaggaccaggttctccaataattcaaggaatttcatgtgatggtggaaagggagactggaaagaaactgaaagtggtcagatcagataatggtggtgagtatcgtggtccattcgaagcttattatagagaagccgggatccgacttgagatgacacccccaagacacctcagctgaacaggctcgctgagagaatgaaccagactatcgaagagaaggtccgaagtatgctatccaacatcgggttgtcgaaagcatattggggagaggctatgagaacagctattgatttgataaatctctcaccatcacgaccgctggaaggagagattccagaggaggtctggacaggtcggagagcgacctatgatcacctgagggtgtttggatgtcgagccttcgtgcacgtccctaaagatgagagagggaagctggatgcgaagacgaaggagtgcatacacctcggttcatcaaaaatcgagtttggttttagactttgggatccaatcaacaagaagattgtgagaagccgagatgtagtcttccatcaaaatgagaccatccatgacatctcgaagcccaaagtccgggttacagtctgaagagaagaacccgtccctcctgagtatgctgaagcagagggagaaaccagtggagaggtcgcaggaggcgatgatgaagatgatgcccagcatcaaactgatgatgccgagattcgggttctgaggaagatgaagaagaagagccgaaataccccaatagagagagaagaccttcttcaaggtatccacctgatgagtataccataattactaaggagggtgaacctcagagttatgatgaggcggtggaaagttcagagagtgctgaatgggaaaaggccatgcaggatgagatgagatccttgcatgagaatcagatatatgagctgaccgagctgcccaaggggaggcgagctctaaagaacaagtgggtgtataagatcaaacaagaggagaaagagcaaaagccaagatacaaagcccggattatagtgaaaggctgcaatcaaaaaaagggggttggttttgatgagattttctctcctgttgtgaagttgacctcgatccggactgtgttagccatggcagctactatggatctggaggtagaacagatggatgtaaaaatggaatttcttcacagtgagctgtaaaaatgaaattcctcatggaacaacctgaagggtttgaggttccaggttgtgaaggcaaggtatgccggttgaagaagagtctctatggcttgaagcaagtacctcggcagtggtacaggaagtttgattccttcatgacagaccataggttcatgaagatggaggccgatcactgtgtttttgtgaagaggtatgagactggtgatttcttgatcttgctgctatatgtggatgacatgctgatagtaggacaagacaaggagaagattgccgccttgaaaaaggcattgagctcgtcctttgcgatgaaggacttgggaccagcaaagcagattctcggaatcaagattatccgggatagaaagaagaagctattgtggctgagtcaggagaaatatgttgagaagatcttaaagagattcaacatggacaaagtcaagacaatgagcacctccttggccggacatctgaagctaaatgagaggcaatgtccgagatcagatgaagacagggagatgatggagaagatcctataccaatctgcagtggggagtctaatgtatgcaatgatttgcactagacccgacctggcacatgcggttggaatggtgagtcggtatctttcgaatcccggcagagagcactgggaagcagtgaaatggatcttcaggtacctccggggtacaaccagtttgtgtcttcgttttggagatggtgaagccgggttgcaaggctactcggatgctgatttatgtaacgccccaactacaattagggtcattaccctgccttaatcactatcattaacactaatcatcagagttaggcagttcggaagcataagaaaaaaaaggacatcatcaaatgtcacaatcataaactttatatacatcaaaatatggtgaatatacataaccatctgtgtcttttacaaaactgtacatcagcctccctctatggggtacaaaataaaccaaaggcatatacaaaacatatgagctacaactcatgtcatctagcctatggtacacaagtctaagctatccctgcacaggcttcttgccttgggatctatctgctccgcttgatgagtcacctgcaaaacatagccccacacacggggtgagatataaaatctcagtaaactcagggcccttgaaggtgtttccttcccctggttcactttcaccacataataacatcatcatcatagccatttcggcgagcaatcacataaacaggatattcaatatcagaatcatcatcaagcaaccacaatatccgttatcatctacttggccacaaccaagagtctcaaatattacccgaccacaatcaggttatacacatggcacatcgccaatcatcacatcaatacatgtcatgcggaggctacatcgtagtatataggaacatctcctctcagggaggctacctctatataccaggcacatctcctgcataaatccctagcggaggcttcctctgaatatacaggcacatctctatctcacgaggctcatctgtatatatcaggcacatctccttttggtgaggctacctctaggtacataggaacatctctcaccaaagaggctacctctatgtaacccaaggccatctcatcctctatcatcctaccattgcctggagaggcttcttctgtgtatatgggaacatctccccgtaggaggctacctccatatcacaggctcatctcttaccaggtctttctcaatcatctatcatctatcctactacaataggatactattcatccaattctaggattcacatatcatccccttatcaaaagggttcttcatacatagaaatcattccctcaacaaagggttcagccatatacaacatataatacttcccatcaagggtctagtttacatttcaagcatatcacgccgttataggccatacatattatccccctcatcaaagggttcagctcacctgtcatacaagtataatcaatgcacataatcccctcatcaaagggttcaaatcaaatattcaaacatccatatgcattacataacatcccctcaccaaagggtctcatttatattcaatatatcataccctcttcaaagggttcagcatgcattccaagcaaatgccatcaacatacaataatccctcatcaaagggttccattcatgttcacaatcatatttcacccatacacaatcattcacacatccagaaccatccctccactaagggcatggcggaacacagcaaaggacacacaatcaaggtccaagagcttacctgctcttcgcaaaacgccggcttccccggtctcgtggctaccaccaccaaaagtgtcaggatcatgtcctacacaaacaatcacataccatcaataacggtcctaagccgttctaaccaaaggaattataatccttttcaacatcacacatataaccaatcacttcacaagtgattcacggaccctcactaggatccctctcggcccaaccaaggccccagagtctctcctaagactccgctcaggctaacacaagcacatccatgctttagccctaccatgtccaagctcaatgatacaactcaatatcagctcatggacagcatctaaaccatccctagagtattcatcatctactctaaggttcaacataaccatgcactcaacccctttctctatacatgcatacctcagagccaaaatcaaacttcatcaataatgatttatgaaggctctattatcatcacaataaccccctaaatacaggtctcttcatgactttgggctaattccaaccccatcacaaaagggttactattcatgcaaaaccccaatctcaaaatcaaactgaggagcttgagttttcttacctcaatggcgtcaaagaagaccctaggaccaccttctcgagctccggtgtccttcccacgcaatgggtttcagccaatcacaaattctcaagctctctctaggggttttccaaaatcactcaaaaggggtttttgatggaaagggatgagtgattctagcttcccaagtgtttctctcacaatcacaagccaattggaagtgttttgatcaacaaatatggctcaaggaagcttgggatggttaacaatggaggtctagggctggaggaggaagaaggaggtttttctcttccaattttcgcgtttcaggctttaaatagtcactcagcccgacatgcggcgccccaggcgccagcccggcgctccaggcgccaacctccagaacccacggcgccccaggcgccacctctggcgcctccagcgccactttccagtaactccggcgcccctggcgccgcacctggcgccccgagcgccatattccagtaactctggcgcccctggcgccacctctggcgctccaagcgccactttccagaaagcatggcgccaccggcgccgtatctggcgctccccgcgccacctgggaaacttggcgccccaggcgccacctttggcgctcctggcgccacatcccagaggccatggcgccctcagcgtgggattggcgcccttggtgccatactccagtgcttctggcgccctaggcgccagacctggcgctcttggcgccgcacctctgtcatggttttctgctgaatgcgccgtttccgatcatctaaacatgatcttagccttaatcgcagacttaaatacatgattaagactcagggtattacaatttaggggggaattccaactcaagaaagtcgacaacgggatatttgatgacctttgctagagtgtcaatctcatggcaatcaagattgcagaagtgtgtgacactttcgacaacgaaggccgagtatattgccgcaactgaggcatgcaaagagttgctgtggatgaagagttttcttcaggaactcggccatgaccaagacaagtatgtcttgaagtgtgacagtcagagcgtaatacatcttgcgaggaactcgacttatcactcccgcaccaaacacattgatgtgagatatcactggatccgggatgaggtggaggaggggaaggtcacacttggaaaagtgcacaccagtcagaattggtctgacatgatgacgaagccggtactagcaataaaatttgaagattgttgtgaaggagccgggctggtgaactcggcatgatgtagccgaggtcgggggtcgggttgtgtgtagaccccggacctcagtggaagaccggaatgacttccgggttgccgtgttgtcacattgaaacggaagggggagatttgttggataaggttccgtttaatgctgacccaaatccctaagtgctgaaaaagggaaaagtttgacttgggcccaattctcaagatgttgacgttggcccatttccatttagtgtaaaatccctaaacctagttcctctctataaataccacatttatagatggaggctgggacgattggagatccagaaagctgacgcagtgagcagcagagtgaccagagcaacaaacagagagtggtgtgtgtctccagcatcaggctgttgagagtgtctccgagaggttgagagtgacccttgttgagagtgtttccacatctgttgttagtgaggtcaagtgtctccagccagaggccgttgagagtttgtaaccattattattgaatagttgattgtttctggactaggtcctgtgggtttttcctcttggaggtttttcttccacgtaaaactattgtttgtaagtttttctccattgtctctcgcgcatccttcgtttttgatcttttttcacgtttccgcatattttcgctgtttgttttggctgagggttgagtccggtgacttcccagttgttatgattggttgaggtattgctcccaaccgagaaggagaagtttgggtggtggcagaccacaacactagcacactactacaaatagtacatttaacgacagagattcgaagtcgattgtcgcgaaaccgatgttgtttgtggtgcggtgacatttttgtaattaaaatgaatatttcaaagtcaatctttgtaaaaccgtttacgtatgtttaaaactacgacggttttggtttaaccgtcttagtttttgtcttcgaaaattgtctccatttttccttttaaaaatttcagccaatcattttcgtgcccttactttcatcccttaaggtcgtctccctctcccattgtccatcaccctagctatctccggcaagcgcacccactcacgctagctataaccacgtcgtggcctccgtgttgaaagttgaagtgagcgtctggcgtctgagaacggcaatgcaagcaggtgaactctgtcagcaccaaaatgaacactcccctcccattttcttcaatccgattcttcctgattttggttccttcactggaggattgtttctcgaccccaaaatacccaattccttcgttcgtttcattttgttcaagattcacggcactcccttttccaaatccaatcctcgccaccaacggagataacctcaaacggtgtcgttcagcagagaaaggttagggtacgaggatgcaatgtcgtcaacaccacgaaacatctctgtgctggtgctatagctgctatggtctctaggtatatttaatttcaccacttcaattgataatttttttattaacagaacttgtgtggctccacttgaaaggcttaagttggaatacatggtttgtggtgagaagaggaacatattccgttcacctttttctcatttctcaactttaatttgcagcagaaaaaaaaaccgattagttccactaatttgacttactccttattcgatttcgtttcaataataatttggtttctcgcagctgaaaaggttactgaagtgggatggtacgttcttggcgaggatcagcaacagattggcccttatgccttctctgagttgcgcggtgagtgagttctttgatactcttttttttttgtacctttgaataacaaaagtggagtggagctagggttaggtatttaagtattgtatattttgatttttgttgtttgttccccaattaattaagtgaatacttaggcagtgctgtttcagactttgagcacatttgttttatgttgaaatcgaaacctctatttgtcatatttaaatggaaattggcatggacagagcatttcttgaatggatacctctcccaaaatacatttgtgtggtctgaaggaaggagtgagtggcagcccttgtcctcagtttctgacctgtgggctcaaaattcagttgtgcttgtgcataataaattcagttgtgctctaattgtactagtttttatgataaattcctttcaggtatactgccactgcactttgtcttttacttaagttttgcatgatatttgttggctttaataaaacatgtgtgtttgcttgattggtgtgttagtttatcctataatttagcatgcctaacgagagtgacactaggaatggtcattttattctattccatactttctcctttcccattctaacttcaataattccaatggatgatttattttttcttttgttaacaacatgtagattggcaatgatatttcccaatttttgggcccacttatattgaatcagcttttaatatatcagttactcttttactgaattgttactggttaaggacctctagtgcatgtttagtggactaatggaagaccatccccaaatttattacacacacacactgacattattattctctaaatatcttattattaatattatttttatttttatcaattttcgtaatgccattttacttatcctataaattgtatgcagtctatgcaaaatggtgatccatcctggactggctatgcatatgccttctcaatatttgttggagtggtatgatgcaaatctgattaaactcttgattgataatatttggtttcatcaaatgcattgtgaagctatcaattgttatgcttgcatctttagtttgatatatttgatattactgtttgttgcggattgtaacatttgacccgttttgtaattgcttttgcatgtttacaagttttgataaacaataaagaatttttttcttttttgtaaattaggctgctcgatggaattacatgcaagtaatttataacttttgcaagttttgacttattaagagcctatctgaatttgtttttgattggtctttggggtgttatgtgaagcttaatatttcagaatgttatgcgtgttggctaccggttaagatcaacattggtaagtcttttttatttttacatatatttacccacacctttatttcccattgagttggttgtcaaagaactagttgtcctaaaagtttaagccattaaatgggcaacaaggatttccttagtaaaatctcattatatttctaataaaaaaaattatgtgaaaatatttaaagttttctgttttttcaacccatatcctttccttgcatttgatgtatgttctctttttctctctaaataacttttacctttcttttctcccctagtccaattgggataaggctttttgttgttgttgttgttgttgtattcaaaccaaaaagaccactttgtcaactgggctttgaaactactagctgccaaaagcataatttcatgaacatgttttcaagaggaacatatttgaaacatagattttggagcattagttctacggtttagctgaaaatctagctatatcaatatagcattattagcatatagcaaatgatgaacttggtttattctccgaagttgataattttctgacaatatcaatcattagattagagattccattcaggcttcattcccagattgggaatgctgcactcgtgacttgaattttttatcttcaatgtgcagttcgaaacattacggcctgaatttcgatctggcctagatgctctgacgaagtttgtttttgagagagcaaagccaaaacaagttgtggcaactatgatgacaggtcctgtgttgattggaatcactgagtcttatctggatgctctcaatcatggtgttgtgcctacaatttctaagacggtgacaggtcagtgtgtccatcattaaatcaaggctgcatgtgagaatggaatgtatataacacatgtcttctttaatgttagtaaaccatgtttctaattttgaccatgtttctaattttggccatacgtggcaataactaatagaatgtatatgttttcagaaacattagtggctcattgcatagtatgatttttttacagctgtcgtcctgttttacatttaaacttgataatttttgttatttcttttaactaaaaaaatctttttaagttgcatttatattagaagtgtaaaaaaatcaaaattttataaaacttcatagaagaagataaagtatatgtaccagttaaaactatttgattaaatttggtttaaatttaaaagaaaaaaaaaatcaacaagctcacatcaaactaacccaaagatcaaaagttggtatactttggcctatccaattgataacctattaatatattaaaatcttaatttaaggtttaggaaattcacagaatagatgagaaaactaatagatgtgcttgtatctgctggggttgctacatttcttggtgcttcattttccattctcttttcatccttggtaaaagactttgattacacctttgcaccatagctacttgcccttgctaacaactccaatgaaactttgcttatattttcctatatatcagtacattctataatttcacaaatttggtaggtactaaccacaaacaaaaacagtcatattagcaatatagcatacaacacactgccatgaaaaatacatgtcaaaccttaatgaatagaaattgacttgtactctttgactgtatttgtaatagcctgctccactggaagtctttccatacttgaagccccataaaacccatgaactcctttggttctcttcaatataagttctgcctctttaaagtttgtattcaaagtcggttatttaaaataaccgtctttgaaatcacaaatgcgattttctaagttggttattttaaataaccgtctttgtagataacttttcaaagtcaattatttaaaataatcgtctttgaaatcacaaatgcgattttctaagtcggttattttaaataaccgtctttgtaaataactattcaaagtcggttatttaaaataaccgtcctaaaatccttttaaaaaaattgtaatttattatttttaaaataaacgacattcaaagtcggttttatggtaaaaatagtctttgattctcccattcaaagttgattttttgaaaaaatcatcgtcgattgtatgaattttaaaaaaaaataatgaaaaaaaatgctttctaagacggtcttgtgtaaccgtcgttgtaggctcccctattccacgacgtgtacttataaagacggtttcaaaaccgactttgtatggctaaaataatcgatcttgaatatacgcggtgtagtagtggcaacttatacaatctcacgataagctgcaatagcccaagtttaagcccagtcaatatacaaaaccaaatgttaacaatacagatatatgcttagtgaaggaaagcaatccaaaaacgattcaaagtatgcgacacgttgcaaatactatcaaataatttatctcaaatagaaagatgaaagaatggaggttttgtaggcaaaagacttgaaagggcataaattagtagtaccaaatacaaagagtgcttttttatcaaatgggggtaaaaattttaggtaattacgttttgggggtaaaaaaaaaaaaaaattatttcccatataggggtaagtcgtgccagcttctacgactttccggtcaaaagtcgtaacacatattacgactccgtttttttttaatattttaaaactattttaaattagattataatagaagtcgtaaatatattaaatatattgatgactttaaagtcgtaaatatatatttacgactttaaagtcgtatgaaaccgtccgaccttcgttccatatttattttctttcgaccttcgtcccatattcattttctttcgatttaattgtccatacgaccttaatattttttttcaatttaattaaataatatatttgaagtaattatttatttaatttaaaaacatataatttaaaaaagttgttattaatttaatatatttttttattatttgagtaatttaaaaagacaaataaatttgtttatatattgagcataaaattacaaatttttattacttaaacaaaatttaaaatttttagttaaattattttaaaaatatgaaagtttaaaataaaaaataaaaaaattgaaattgtttaaaaaagaaaaaataaattattaaatttaaaagaaaaaaaagggaagtcgtggagcatcacacgacttcaaagtcgtggagctccacactactcccattaaaatagaaaaaaaaaaggaaacagaaaaaatggaaaaaaaaaactataaattttaggttgtttgaaaattaataaattggatagttaaataatttaataaatatacaattttaattattataatatataaaataatgatatttaatttgtttgtttcttttatgtatataaattaaactactgtaattttttatatcaattttattagttttaaaaataattttgtaattgttgttagcaattttaaatttctaatttggatagaaatattgtttgataaatttttttgtaatagtaggcttcttttttttatatgaaataagagatatatttatttattttggtaaatatcattatgttaattaatcatttgatttggcatacaattttgtattacttaaacaatatttaaaattgttagttaaattattttaaaaaaatatgcaagtttaagataaaaaataaataaaaaattaacattgtttaaaaaagaaaaaaattaaataattaaatttaaaagaaaataaaaaggaagtcgtggagcatcacacgacttcaaagtcgtgtagctccacacgacttctaagagaaaaaaaaaagagaaaaagaaaaaatgaaaaaaaaatgagaaaaggaaaaaaaatagaaatattatttgattaatttgtttatctaatttatttaataagtataataattttagttaattagcaaatgataattgaattttatagaagtagttgtaaaattaatataagatataatttgaaagagatatatttataagaaaaacttaaattaactacatagtcattaaaagaaataattaaaaatgtgacgagattccacaacgagttcttctagataggcgtcgaggtctttcatgttgatgcactggatttgggtctgggtttgttcttgttctaccacctacctcttcttcttgttctacaatgatcacgcgtgtgtatttgttgttgttgaggaatatcatgatcatcgtgcgtcgccatcatgatcatcatcattattggttgtattattttgatcatcatcattatcgtcgtcgtcatcattatcatcgtcatcatgatccatgtcatgcatttgagtaggtaatgtcagacgataaaaagatatcgatagtgatgggttatatgctgatggcggagtgttgaaggtggtaccaaacctctgtgactgtccttcaaaaatgttcgacgtataaggaacttggaatgagtactgaggcacatacgatgagaacccaaattgttgtgatgttgttcaccaccttgaggcaagtgtccagagaaacccactggctgatgaaaaggttgtccaaccaattgataagagtgggacataaatccagaaacatgtaccggaggtatatttgggtcagcatgtggttgatagtgttgatagccagcacgtgactgattttttaatttacaaatctataatcattaataatagcaataaaaataatatacaattaacaatagtaaatttacctcataaataggtgtcccctcacgtgatatataacgtctagtttgacgtatataccattgcatgtattcagtgttatcatgcaaaatactctggtccattacaccgtgaacaatgaaatcattccaatcattgtatgtgtgaatccagtgactatgttgtaaaggccaaaaaatatccgttctgcctctcatatctatgttgtggacttcatcgaggtttggtgggtcatgtggaatattttgtctcattccaaattgtctcatgaccctgtccatcagatgccattacacaattgtgtagcaaatgagagggattcttgcacgcacaatcatagatatgtctacattttgaattaattgccttattttgggggtgtcgtacagtgtccacaagaactacaaaacataatattattgttggtagcagtttataaatgattaacttaatgtcaaaattacagagactttaatcattaagaaatgaacctcgtttatgtgtagtctatcgaaaatgtcgcgtatcaatctcactgagttggtgaatatatttgtttgtgttgtaggacgagaccaccgtcgggcaagggggaacccaacaccttgctggacttcttcgtctgacatgggaattatctgcggggcaatacatctaatgcggtcccacgcccatgattgaagaagcaacaaacatccaccaatttcaatttgtgaggctttaacagctcgatctagtgattgaaatagggaagctaatactgctgctccccaattataggtagctgcctcagccaagttggctaacatcaaaagatacataaaatgtatgcgtgctccagatgtgtccggcatgaaacaaccacctatgagcatcattatatgagctctagcatgttggttgatgacaaactcatcagcatcggcaggaaggtgttgaaaattttgccacaaccatgtcaggtaaatagttttgcccttaatatacttatcaggaggagtgtcccccaataaggtctaacaggcttcacgaacgtcaccaaaggtcactccggttaaggccacgccgtttattttcaggcctagttgaagtgcaatgtcttgtagcgttatcgttgcctctccatacggaaaatgaaatgtgtgtgtttcggttcgccatcgttcaaccaacgcactaaccaaatgttggtcaatttctacttgtcccacagccaagatatgaccaaaaccaacttgatgtatgatgttcttcacacggttgtctatctcattgtaatgtgtcataccccacacaaaatgaaatcttggacgaatcaagcgctcctgaccttcctatattaggtttgaaacatgaccatcttggaatcgtaacaacgatccatcaacaggtcctggttgtgtgtttgccatttgataactttagaaaagcaatacgaagtgaaaggtaggtaataaggaagtttgaaataagattgaggaagaaagtgttcaaagtgttgctgcacgaagaaactaagttcaagcttcacatttataaactcaagtgatatgtacgttagtccaatgaatatataaattttatttttcactataagtctgaattcttcacgtgactgacatgcattatttaagatgaggccaaccaatttttcaccacatttatgatgaaggcaaacttttatacatgcttgattggactaatgtctacctttgtcatttaaattcacgtgaggtattacataatgtgtacagtccaaaaatagtaaaatgacaagtggccatctcttaaaggtcacggtacaatatatatcttccacgtcagcattgccgcattaaagagcatatctatgatatcaacatattcaaataggggtaacccccttatctaataatatctcaacaagttatctactaattgttacttatctacaagtaacaatatatcaataaggtacacattatctattattcaaaatatagataactgcatgctattatctgttattattatcttatcaatagattatctataagcagcggcccaaggcccatactccatgctataaatacaaccatccaggttctctctaaacacacaacttacactacttgactatgctactttacacttctatccatacagaacttgaatgcattactcaagtctcttattctttatatcttgactgagttctcacacttagtccctttctaaattaatgtacttacttgagcgtcagagtgttttcctttgttttgcaggtccctcctctaagcaaaatctactcacttctcgacgacacaagatttggaatccactaaggccacattgagcccacacgtggaatttccagattttggtaagaacgtaatgcatttggactttgttgaaacttgatgcttctgaccaaaagcccttatcatttaaactcatgacaaccttcaccatgctagagaacaaagctatataaccacgcgtttgacaaagccttcaccattattggtggtgagtactatcacaaagctactttcttcaatgccagccacgcaaatttattgtgctttatcaattttcatttccaaacttttaatatagtttcaggtcatggcactatggcctataggacgagcaatgtaacaccccgtaggcctccgacgtgttatcattaataatatcagattagcgcataatatccaattataaacaatagcggaagcatagaatcgttttcttgatacattatgtgtggatacacataaacatatagacagaatcataaatcacgcccctgctgatccagtttctcatcacacacaacaatataacaaatagcagaaacaaaggcagagtatcaacacaactgtatatacatatcctcagggagagtatcataatacatcaaagttctgtacatatatcagtttcacaccacacgcggtgctacaaaagaatatcagccctcctagaggggtatacaaaactatacacaaataaatcaaaatagagcctacaagccctctatgctgctcctccactaagcagactagtctcnnnnnnnnnnnnnnnnnnnnnnnnnnnnnnnnnnnnnnnnnnnnnnnnnnnnnnnnnnnnnnnnnnnnnnnnnnnnnnnnnnnnnnnnnnnnnnnnnnnnnnnnnnnnnnnnnnnnnnnnnnnnnnnnnnnnnnnnnnnnnnnnnnnnnnnnnnnnnnnnnnnnnnnnnnnnnnnnnnnnnnnnnnnnnnnnnnnnnnnnnnnnnnnnnnnnnnnnnnnnnnnnnnnnnnnnnnnnnnnnnnnnnnnnnnnnnnnnnnnnnnnnnnnnnnnnnnnnnnnnnnnnnnnnnnnnnnnnnnnnnnnnnnnnnnnnnnnnnnnnnnnnnnnnnnnnnnnnnnnnnnnnnnnnnnnnnnnnnnnnnnnnnnnnnnnnnnnnnnnnnnnnnnnnnnnnnnnnnnnnnnnnnnnnnnnnnnnnnnnnnnnnnnnnnnnnnnnnnnnnnnnnnnnnnnnnnnnnnnnnnnnnnnnnnnnnnnnnnnnnnnnnnnnnnnnnnnnnnnnnnnnnnnnnnnnnnnnnnnnnnnnnnnnnnnnnnnnnnnnnnnnnnnnnnnnnnnnnnnnnnnnnnnnnnnnnnnnnnnnnnnnnnnnnnnnnnnnnnnnnnnnnnnnnnnnnnnnnnnnnnnnnnnnnnnnnnnnnnnnnnnnnnnnnnnnnnnnnnnnnnnnnnnnnnnnnnnnnnnnnnnnnnnnnnnnnnnnnnnnnnnnnnnnnnnnnnnnnnnnnnnnnnnnnnnnnnnnnnnnnnnnnnnnnnnnnnnnnnnnnnnnnnnnnnnnnnnnnnnnnnnnnnnnnnnnnnnnnnnnnnnnnnnnnnnnnnnnnnnnnnnnnnnnnnnnnnnnnnnnnnnnnnnnnnnnnnnnnnnnnnnnnnnnnnnnnnnnnnnnnnnnnnnnnnnnnnnnnnnnnnnnnnnnnnnnnnnnnnnnnnnnnnnnnnnnnnnnnnnnnnnnnnnnnnnnnnnnnnnnnnnnnnnnnnnnnnnnnnnnnnnnnnnnnnnnnnnnnnnnnnnnnnnnnnnnnnnnnnnnnnnnnnnnnnnnnnnnnnnnnnnnnnnnnnnnnnnnnnnnnnnnnnnnnnnnnnnnnnnnnnnnnnnnnnnnnnnnnnnnnnnnnnnnnnnatacctgttagccaactcgggatacctctgtaacagctcctgctctcgttcccaagttgcttcttcaggcgttcgaccttcccattgcaccttgactatgggaatggtcttactgcggatttgcttctccatcctatccagaatcctcaagggccgtgtaggactcgtcaagttctctctgatctgcactgtatctggctctaccacgtgtgagggatcagcaacgtacttcctcaactgagacacgtgaaacacatcatgtaagccagataactgaggaggcaaagctagcctgtatgccactggtcctatcctctccaggatctgatatggaccaatgaatctagggctcaacttcctcacacctaaagctcgtcctacgcccgtgactggagatagcctcagaaacacatgatcaccctcctcaaactgcaagggtcggtgcttctgatcataaaaacttttctgtcgactctgagctttcatcaacttatctctgatcatcttgatctgctcagaggtctcttgaaccatctcaggtccaaggagctgcttctctcctacctctgtccaacaaatgggagtcctgcaccgtcgcccatacaaagcctcatacggtgccatgcccaagctggcatgataactgttattgtaggagaactccacaagaggtagatacctgtcccagctagagctttgctccaaagcacaagctctcaacatatcctccagagtctgaatggtcctctccgtctgaccatcggtctgaggatggtaagctgtgctgagtctaagctgggtcccaaaagcatcctgtagcgcaccccagaacctcgaggtgaacttaggatctctgtcactgatgatactgtcagggactccatgcaatctcacaatctccctgacatagagctgggccaacttctctgtggtgtagtcagatctcacaggtaagaaatgagcagacttggtcagcctgtcaactatcacccaaatagaatcatatacactctgagtcctcggtaatcccaccacaaaatccatggaaatgctgtcccatttccattcaggaatctccaaaggctgaagtagacccgacggtctctgatgctcaatcttgaccttctgacacaccaaacacttggtcacatgttcagctatgtnatacatcttggtggctcctggatggatgctgaactggccctgatgtgcctcagctaggacgatatctctcagctcgcccttaggcaccacaatacgatcttggtatttcaccaagtcgtgatcgtcccaagaaacatctgattggccaatcatggctctcacatcctcatcctgctgctgagcttccctgatcttcctgatcagctcattatctaccttggtcctgctcaactcaaggccacatgcaccttctgtcactgtcaggtgcatgtctctgaattgctcaatcaacttgcaatcagagatcatcaaacatgcagcagtcgcattcttcctgctcaaagcatcagcaaccacattggctttgcctggatggtatctcagctcaaagtcataatctttcaagaactccatccagcgcctctgtctcatgttcaactctttctgatcaaagaggtatctgaggctcttgtggtcactaaacacaactaacttggcaccatacagatagtgcctccatatcttcaaagcaaacaccacagctgccaactccaggtcatgtgttgggtaagactcttcatgtggcttcaactgcctagaagcataggcaaccaccttnnnnnnnnnnnnnnnnnnnnnnnnnnnnnnnnnnnnnnnnnnnnnnnnnnnnnnnnnnnnnnnnnnnnnnnnnnnnnnnnnnnnnnnnnnnnnnnnnnnnnnnnnnnnnnnnnnnnnnnnnnnnnnnnnnnnnnnnnnnnnnnnnnnnnnnnnnnnnnnnnnnnnnnnnnnnnnnnnnnnnnnnnnnnnnnnnnnnnnnnnnnnnnnnnnnnnnnnnnnnnnnnnnnnnnnnnnnnnnnnnnnnnnnnnnnnnnnnnnnnnnnnnnnnnnnnnnnnnnnnnnnnnnnnnnnnnnnnnnnnnnnnnnnnnnnnnnnnnnnnnnnnnnnnnnnnnnncttgtctctcaagatctgaagaactgtcctgagatgctcggcgtgctctgactccgtcttggagtaaatcaggatgtcatcaatgaacaccaccacaaactggtctagaaaaggcctgaataccctgttcatatagtccatgaacaccgctggggcattcgtcagaccaaaaggaatgacctgatactcaaagtgaccatacctagaccggaaggctgtcttaggtatgtctgctggcttgatccgaatctgatggtatccggatctcaggtctatcttggagaacactctggctcccctcaactgatccaacagatcatcaatcctaggcagaggatacttgttcttcacagtaaccttgttcagctgcctataatccacacaaagtctcatactgccgtccttcttcttcacgaagataaccggtgctccccacggcgagacacttggtctgataaactgcttggacagcagatcctccagctgcaccttcagctccctcaactccagaggagccatgcggtaaggtgccacagagattggtcccacccctggaaccaagtctatagagaactctatctccctctctggtggtagctgggtaatctcctcaggaaaaacatccctgaactcgctcaccaccggtatctgagacaggtcgacccctggcttatcttctgtaactcccaagaagatatagccctgagctccctctctgattgccttgcgtgcttgcaagattgaaagaaatgctgtagagctcaaacctgcatcatcagaaggcacaacaaccttcttctgacaacagtctagcatcacaccatatctagtcatccaatccatacccagaatcatctcaagggtaggcatcgctagacaaaacaaatcagccacataggctctgccctcaaagcaaaactgcacgtccttgcagcacgtgctcacttggcatctctctctagatgcagtcataacctccatcggagggtcaaactggttttaggcaatctcagcctctcaaccaccaagtcctgaacaaaggaatgtgtggctccagaatcaaacaacactctgacatcacagtcatcgattagaactgtacctctaatcaagtctggagctctcgccgcttctctggcgtccactgtatacacccggcctgctgtgggtgccaaaatctccaccgaagcagcctgtgcccgactctctgtctgagggcagtctctagatatgtggcctggcttgccacatctgaaacaaactatctggcctgaggaacacaatccccagtgctcacgtccacaggctggacacttcggaggtggtctcctctgagtggcactgctctgcccagatcttctcttgaatctatcagatgatgcagaggtcttccacatcttgcccttacccttcttgggcgggccagaatcaccatctctccttccctcctgtctgactgagggagtaggctgtccgcctttctgctgtctctgcatgatacactccacctggcgactctgccttaccagagtatccatgtctcgcgaccccagaccagccaccaacacctggatgtcatctctaagtcccctcaggaacttagctgctaaagtctcagcatcaggcatgggcttcctgaaatgagcatactgggccagctcattnnnnnnnnnnnnnnnnnnnnnnnnnnnnnnnnnnnnnnnnnnnnnnnnnnnnnnnnnnnnnnnnnnnnnnnnnnnnnnnnnnnnnnnnnnnnnnnnnnnnnnnnnnnnnnnnnnnnnnnnnnnnnnnnnnnnnnnnnnnnnnnnnnnnnnnnnnnnnnnnnnnnnnnnnnnnnnnnnnnnnnnnnnnnnnnnnnnnnnnnnnnnnnnnnnnnnnnnnnnnnnnnnnnnnnnnnnnnnnnnnnnnnnnnnnnnnnnnnnnnnnnnnnnnnnnnnnnnnnnnnnnnnnnnnnnnnnnnnnnnnnnnnnnnnnnnnnnnnnnnnnnnnnnnnnnnnnnnnnnnnnnnnnnnnnnnnnnnnnnnnnnnnnnnnnnnnnnnnnnnnnnnnnnnnnnnnnnnnnnnnnnnnnnnnnnnnnnnnnnnnnnnnnnnnnnnnnnnnnnnnnnnnnnnnnnnnnnnnnnnnnnnnnnnnnnnnnnnnnnnnnnnnnnnnnnnnnnnnnnnnnnnnnnnnnnnnnnnnnnnnnnnnnnnnnnnnnnnnnnnnnnnnnnnnnnnnnnnnnnnnnnnnnnnnnnnnnnnnnnnnnnnnnnnnnnnnnnnnnnnnnnnnnnnnnnnnnnnnnnnnnnnnnnnnnnnnnnnnnnnnnnnnnnnnnnnnnnnnnnnnnnnnnnnnnnnnnnnnnnnnnnnnnnnnnnnnnnnnnnnnnnnnnnnnnnnnnnnnnnnnnnnnnnnnnnnnnnnnnnnnnnnnnnnnnnnnnnnnnnnnnnnnnnnnnnnnnnnnnnnnnnnnnnnnnnnnnnnnnnnnnnnnnnnnnnnnnnnnnnnnnnnnnnnnnnnnnnnnnnnnnnnnnnnnnnnnnnnnnnnnnnnnnnnnnnnnnnnnnnnnnnnnnnnnnnnnnnnnnnnnnnnnnnnnnnnnnnnnnnnnnnnnnnnnnnnnnnnnnnnnnnnnnnnnnnnnnnnnnnnnnnnnnnnnnnnnnnnnnnnnnnnnnnnnnnnnnnnnnnnnnnnnnnnnnnnnnnnnnnnnnnnnnnnnnnnnnnnnnnnnnnnnnnnnnnnnnnnnnnnnnnnnnnnnnnnnnnnnnnnnnnnnnnnnnnnnnnnnnnnnnnnnnnnnnnnnnnnnnnnnnnnnnnnnnnnnnnnnnnnnnnnnnnnnnnnnnnnnnnnnnnnnnnnnnnnnnnnnnnnnnnnnnnnnnnnnnnnnnnnnnnnnnnnnnnnnnnnnnnnnnnnnnnnnnnnnnnnnnnnnnnnnnnnnnnnnnnnnnnnnnnnnnnnnnnnnnnnnnnnnnnnnnnnnnnnnnnnnnnnnnnnnnnnnnnnnnnnnnnnnnnnnnnnnnnnnnnnnnnnnnnnnnnnnnnnnnnnnnnnnnnnnnnnnnnnnnnnnnnnnnnnnnnnnnnnnnnnnnnnnnnnnnnnnnnnnnnnnnnnnnnnnnnnnnnnnnnnnnnnnnnnnnnnnnnnnnnnnnnnnnnnnnnnnnnnnnnnnnnnnnnnnnnnnnnnnnnnnnnnnnnnnnnnnnnnnnnnnnnnnnnnnnnnnnnnnnnnnnnnnnnnnnnnnnnnnnnnnnnnnnnnnnnnnnnnnnnnnnnnnnnnnnnnnnnnnnnnnnnnnnnnnnnnnnnnnnnnnnnnnnnnnnnnnnnnnnnnnnnnnnnnnnnnnnnnnnnnnnnnnnnnnnnnnnnnnnnnnnnnnnnnnnnnnnnnnnnnnnnnnnnnnnnnnnnnnnnnnnnnnnnnnnnnnnnnnnnnnnnnnnnnnnnnnnnnnnnnnnnnnnnnnnnnnnnnnnnnnnnnnnnnnnnnnnnnnnnnnnnnnnnnnnnnnnnnnnnnnnnnnnnnnnnnnnnnnnnnnnnnnnnnnnnnnnnnnnnnnnnnnnnnnnnnnnnnnnnnnnnnnnnnnnnnnnnnnnnnnnnnnnnnnnnnnnnnnnnnnnnnnnnnnnnnnnnnnnnnnnnnnnnnnnnnnnnnnnnnnnnnnnnnnnnnnnnnnnnnnnnnnnnnnnnnnnnnnnnnnnnnnnnnnnnnnnnnnnnnnnnnnnnnnnnnnnnnnnnnnnnnnnnnnnnnnnnnnnnnnnnnnnnnnnnnnnnnnnnnnnnnnnnnnnnnntcaggttctctgagcttttcctctgaggttcctcttctcactaacaatggaggtttcaaggagcaaggatgaaggatttcgctttctaatcggttcaattgcaactaaagatcacaggtaagggtttagactcacaaaagaggtcagaaaaagcttagaatcacttctatgaaggttagggacgaagaggaagagaaaggaagtgaaatgccctaaaaacaagcttgaaaccccttttataaaactctcccgcgactcccacgccccaggcgtgggatcccacgccccaggcgtggactggcaggaagaaaatgctgtctggttgcctccccacgccccaggcgtggactgccacgccccaagcgtgggatgccacgccccaggcgtggacttccagggaaaatggaatttcaggccatttttccacgccccaggcgtggcactccacgcctccagcgtggaaccccagaaaaggctaaaacaagcttttcaaactagggatcttataagcaatgttcagcaagccattgtcatttccaaacttcagctcatggcatataggacgagcaatattgagtaggccatgtgtttatacaatccttatatgcaattacttcaacagctgttctgaaaaccattttataatgctagcatgaggtgcacgggatggtaaaaaaaaccattttataatgactaccagaagtgcacgtaaaaggcatttattatgaaaggaagaaagccaagagccagcacgtaaggaaaaagacaaaacggaaaaaaaaaagaaaaaacatataaaagaaaaaaaagtcgtgggcatcacacgacttcaaagtcgtgtagccccacacgacttctataggaaaaaacaaaaaaaaaggaaaaagaaaaaattaaaaagaaaaaatggaaaaaaaatgaaaaaggcaaataaaaggtaaaaaaacaaaaaaaaggattatagttttagttaatataataaatagtattaggtaattaattattaagtattgatctataactaaataagaatattatagtataagtaaaatattattagggtgatatttttcaaaagaattttgaatttaatatattagcaggttagggttatagtttttaaaatataattttgaatttaatatattattagggttagggtgatattttttaaaagataattttgagtttaatataatattagggttagggttatagtttttaaaagataattttgaatttaatatattattacggttttagtttttttgctttggtaaataacaatattatggtataagtaaaatattattatggtgtaagttctgagcaattaactattgataagaaagtaaagggaaaataagagtactcatgtaatagtagatttctgatacatctacattcaaatttcttatataattgatgagatcaagctgaaagaatatctttttcgtaacattacggatattacacaaggttgatatctttcacacgtgtagacattgaaattcacatcaggtaaattataagttgctggcatgcatttattacttcagtgttataaactccatgcccttactttcactaacaattgtttccttcgcaccagttatgagtaacaaagaaccgatcataagagataacgttggcgacttcagtgacgacgaagttgaactcaacaatgacgaagacaatgcacaatcgagcaaccaaactcaatatcagtcatcttcgtcaaatgttgacacaattagtagccaactttctgaagatttcgagtactcaaatccatttcacaacaaacgaatgtagggtacaaatgacctttatgaaggtatgacatttgaatcgaaacaagaagctgtcaatgcaattaaggaatttcattttgtttattcatttaattttgatgttgacgagaacaagagtgacaagtatgctgttaagtgtaatcggtatggtaatggatgttattggagggcaagagcatccttcagcaaaatacgtaacaggtgggagatgaaaaaaattaatgatgttcatacttgcacgactgcacatatatcacaggatcatgttaggttggactcctctttcattgctcataatattttgcaattagtgaaaacaaatcctggtatccaaatcaaaactttgattgcacacatactacaaagatttgggtacactgtgtcatacaaaaaagcttggatagctaaacaaaaagctgtcgaaatggcttttggaaattaggaagattcatatagttatcttccagtctagatgacagctgttacacactttgtaccaggtacaattgttaaatacaaaacatccacgataatggaggatggggaacataagtcttcaaaagtaatccttaatcgtgtattttggacttttaacccatgcattgaaggcttcaaacattgcaagccaattgtacaggtagatggaacattcttaacgggcaaatatcatggtactttgttgactgccattgcacaagatggtagtagaaacctttttcctattgcgtttgcaattgttgagagcgagagcaaagaggcttggatgtggttcttgcatcatttaagaagatatgttacacctcaaccaaatttgtgtattatatcagacagggggaccagtttgcttgcagctttgcgatcagaaggagttgggtgacatggtcccgatgtatcttctgtttactgtattcgtcacatagcatcaaattttaacaaacaattcaaaaatgctgatttaaaaaaacaagtcattaatatgggtaacattctaaccatttcatcataaataactcttacattattaactgtaataaatatttgacattttttatggcctttttccacgggatgagttacggagacctcgattggaggcaaagttgcttgcaatacgatcacagttcccacaagaagtagattagttggaacaaattcccaagtctaaatggactcatgcatatgatgaaggcagacggtatggccacatgactaccaatcttgctgaatgtatgaattctgttttgaaaggagctcgagcgttgcctattactaccttagtcaatgaaacatttaataaaataaatgactcatttgttactaatggcatgaaaacaatgaacatgataaaggtaggacacagttactctgaagatgtctacgtaatgatacaagaaaatcaacgaattgctacctcgcattattttcgcatgtacgttcgggaaacaagtgagtttgaggttcaagaaattgctaatacgcgtcatgggcaacgaccaatgagttacactatcaagttgaatgaatggtcgtgtgagtatgaacatttccaagcttttcgaattccatgctcgcatgcaattgcaggatgtgcatcctgcaacttaaattacgatcaatttgttgatcctgtatataagttgcaaaacatttgcaaagttatcagcatcactttcattcccttggaagtgaagaaaattgacctcaatatttgggtacatattttatgtctgatgattcaaaacgatgcaaaatattaggaaggtcagtcattactcgtatatatatcgagatgaacgaaccaattccaaataaaccaaaaaaaatgttcattatgtagaagcgaaggacataatcgtcgtaattgtccatacaaagaagttgccaactaatgttatttgtatttgtttttttacatttctttactttctcatcttcatcaaatattgattaatatttttatgcaacatatttaattaatgttattaaatgtattttatttggttttaatatatcaattactcatctaatataattttaactgtccatatgattattctattgaattcttttgaatatttatgtcaaatcaaataattaattaacatattaatatttaccaaaaataaataaataaatacaaataaataaatatatctcttatttcatataacaaaaaaagtctattgttactaaaaaaatttatcaaacaatatttctatccaaattagaaatttaaaattgctaacaacaattacaaaattattttgaaaactaataaaattaatataaaaaattataataatttaatttatatacgtaaaagaaccaaacaaattaaatatcattatttcatattttataataattaaaattgtatctttattaaattaactatccaatttattaattttcaaacaacttttcctatagttttttttttcattttttgtttcctttttttctttttttttttttnnnnnnnnnnnnnnnnnnnnnnnnnnnnnnnnnnnnnnnnnnnctttgaagtcatgtgatgctacacgacttccctttttttttctttaaatttactaatttaatttttcttttttaaacaattttaatttttttttatttttttattttaaacttacatatttttaaaataatttaactaaaaattttaaattttgtttaagcaataaaaatttgaaattttacactcaatatataaacaaatttatttgtctttttaaattactcaaataataaaaaatatattaaattaataacaacttttattaaattatgtttttaaattatattaaattaaataaataattacttcaaatatattatttaattaaattaaaaaaataaatattaaggttgtatggacaattaaatcgaaagaaaataaataatgaaggtggtacgaaggtcggacggtttcatacgactttaaagtcgtcaatatatttacgactttaaagtcgtcaatatatttacgacttctattataatctaatttaaaatagttttaacatattaagaaaagaaaaaaatcggagtcgtaacatatgtgttactgaccggaaagtcgtacaaactgggacgacttatccctatatgggaaataaaaaaaattttaccccctaaacgtaattacctaaaatttttacccccatttgataaaaaataaaaataagaaaaaaaaaagcctacaaaaagaaaacacaggtgcttactggtgcctaacgcctaaccagttcagaaagaatgtggttgtctgcaaaaaactttctcactctttaaattcaccatcaatgaagtcctgaagagcgatcattttgatagagttggccttcaagctgtttatagcttcagcagtcgccagagctccattaactgttgtcacaataggaaccttgtaatccaaagccatccttctgagggccagaccatctatccgatcaagtgcatcatctgaactgatggttaccaccatcagctgaatgtctccattggctatcatgtcaccagcatgaggcctcccttcatgcaacttcagcactggctctgctggaattttagctaagttaagaacatgagctgttccactggtagcaacaatcttgaaaccattctcaacaaaagcctttgctatcttctgaagatgtggctttgttaagtcgttcaagctaaggaacacagtaccagaaagtggtaacttctggccagcagcaatttgagctttagcaaatgcaatattatatgaatggtcaatacccatgacctcaccagtgcttcgcatctcaggacttaaaaacacgtcgcagcctggaaattttgaaaaaggaagaacagcttcctttactgacacatatttagggataatttcttttgtaaactgtaaatcatagagggtctttccagacatgacaagggaagcatatttagccaagggatggccaattgctttggatacaaatggaactgtacgagaagctcgagggttggcctctagcaaaaatacatctcctgatggagttattgcatattgataatttacaagcccacaaacattcaatttcttggctaaattttctgtccacgacctgattacctccaagcaagaagcaggaataattctggttggaatagaacaggcagagtcaccagaatgtatcccagcctgttcaatgtgctccattatcccaccaatgactacatttccttgtgagtcagccagtgcatcaacatcaatctcacaggcatcagataaatacttgtcaattaatacagggcgttctggatccacctcaacagcattttcaaggtaagtgaccagtttatcatcactatacacaatctccattgctcgaccacccaaaacatatgaaggacgaacaacaactgggtatccaatatctgatgcaatggtaagtgcatcagttttactcctagcaattcctcctttggggtgttcaatctttagatcatgaagcatcacattgaacctctctcggtcctcagcaatatctatggaatcaggagatgttccccaaatgcgtacatgaccaaccccactagcacatgctggcttgtgttcatcaaggtactgttgtatggggagagataacttcaatggtgtttgacctccaaattgtacaatgataccatcaggcctttccaaatcaataatgttcaaaacatcttcaacagtcaagggttcgaagtatagacgatcactagtgtcataatctgtggagactgtctcggggtttgagttcaccatgattgtctcatatcctgcatcctgcaaatgcaatagacaaggattacatatagtaagagtagcaactgcacaaaactcagcataaccatctagctggtctaatcttaaaataagtgggaatcagttcctattaatgcttaatatcagaattggtaagataacatgcaaggacaacttaatcacttaaaaaaaaatgatcatagataggggacacgaaatttaaacttaacacttcgttaatgcttaatatcagaattggccaatatcatgcagcatcagcagcaccatttgaaccccagttaaaaaatttcacagcgaaaaaatcagaaatttaatccaattattgcaaaagagaagaaaacaaacctgaagagaaaaggatgcatgacaacaacagtagtcaaactcaatcccttgaccaattctatttggtcctccacccaaaatcaagaccttctttctagtagtgggagctgattcacactcaaaatcataagaagaatacatataaggagtattagcttcaaattccgctgcacaggtatcaactcgcttatatgctggagtaacacccagagacaatcgcttattgcgtacttctttctcagtggatttagttgcaaatgctatctgtttatcactaaaccctcttttcttcacctcatagaaatcaatatttgtcaaatcagacaaattgtgagacaacaagaaattttccacatcaaccagctccttgagctgcgtgagaaaccatttgtcaatgtaactcagttcaaagatttcatcaatatgcatccctcttttcattgcagcatagatggcatgaatgcgctcagggttaggaactcggaggctatacttcaattgctccaagtcatagttcatctccttcacttgtgaacacccccatccagagtatccacactctagagagcgtacagctttttgaaatgactcttggaagtttcgccctacagccattgactcaccaacagatttcatctgtgtcgtcaatattggctgagaaccaggaaacttctcaaaagcaaaccgtggaatctgcaccgcggaaaaaaaaaaaaaaaaaaaaaaaaaaaaaaaaaaaaaaaannnnnnnnnnnnnnncacatgatttgatccataacaaaaatcagaaatgtagtttagttagttcatcagattataaactcaataacttggaattacataaacagtgatttactaactatacaaaatttacaatttaaaattaaaaccatcctaccaaatcacattagtatatgatggcaatatcatcaacaactaagttgcataccttagtaacaacataatcaatagagggctcaaaactagcaggtgtcttctttgttatatcgtttggtatctgatccaaagaatacccaacagacaacttcgccgccatctttgcaatgggaaacccggtagccttagacgccagagccgaagacctggaaactctggggttcatctcaattaccatgacctccccattctcgggattaaccgcaaactgcacattagaccctccacactcaacaccaatctccctaattatagcaattgaataatccctcagcctctggtactccttatccgtcagagtctgcaccggtgcaacggtaattgaatccccggtatgcacccccatgggatcaatattctcaatggaacaaatgataacaacattatcagccaaatccctcattacctcaagctcgtactccttccaccccaacagagacttctcaatcaaaacctgattagtcacactagcagcaatcccagccttgcaaatttccaacaaatcttccctgttatacgcaattccgccgccggtgccgccgagggtaaacgccggccgcacaattaaaggatattcgccgatatcattggcaatgctgaggcactcgtcgagcgtggtgccaataccggagggaggggttttaatcccaatattctgcatggcctgtttgaagagttccctgtcctcagccttcttaattgcgtcgagctttgctccgatgagttccacgccgtatttttccaaggcgccgctctcggcgagggcgacggcgaggttgagggcggtttggccgcccatggtggggagcagcgcgtcggggcgctccgattcgaggacgcgctcgacgagctccggcgtcatgggggtgatgtaggtgcggtcggcagtttcaggatcggtcatgatggtggcggggttggagttgatgaggacaacctcgtacccttcttcgcggagggccttgcacgcttgggtgccagagtagtcgaactcgcacgcttgcccgatgacgatggggcccgcgccgaggattaggatcttctttatgtccgtccgcttgccgagtttgggggcgatggtaggttccgcgacggcgacggcgacggtgaagcatcgcacacgcgcggggttgaggcgcgtagtgggaggaggacatccgcggagggtggcggggggaacggcgtggttttgtgaacggagggttataggggaacggaacgggatttgggactgagggaaagaaggaagaagtgggagtttggggaagtgggagatgcaatatgccattgacattgtggattggaggcgcgagtgttgcttttaatggatggaagatgctcctccgtcgccgtcacctttctgaaacgactatgtagggtggaaccccggtcctaggagcttatatgggttttttagtgattttttgtgggtccttttataagatatagttccttatataagatgctcaacttaaatttaagcactccaggagagagaaaaaagtaaaaaaagatgtcaaatcagttaagaaactctcctaagatactgcattgaagatggcatatcattgatattagtcggatataattcctttctgtctaaaaaaaaaaaaaacatatttttagatagtagatagaatatagatagacaaaaataataataaaaattcaaaaatttatttctaaataatagttataacataatcatagataataaaaaattcaaaaatttaaaaaattgtttctaaataatagataaaagatagatatagtaaaagatagataaatataggtaataaaaaaaattgaaaaatttgtttatagataatagatagaagatagatatagaaaaaaaatttgaaactaaaaaaaagttagtcatttactatgatgtttttaaatttttaaaaaatttgaaataaaataaaataaaaaattccaaaaatcaaaaaataatttttagacatttactgtagtatttttgaatttcacaaaaaaaaattgtttgggccattttcattttttctatatagatttagcaaatattgtgaatagtgggacactggtcaattgttgggtgaaaagaatattcgtggacaacggtaattcaacagatatcatctcgtggactgccttcaagaagatgaacttagacgaagaagatctgaagccatgtaaaaccatgctaataggttttaatggcgagaatacgggattgaagggatccatcgaattacgactcacattggggaccagagaagccttcaagtcagaaagggtaacatttgttgttgccgacttcacctccccatacaatatcattctcggaagaccgaccatacataaatgggacatgctaatgtccacaaaacaccaaagttgaagatggtggggcataacggcaaggtaataaccatctatggagaccaaagagaatctcgtcagtgttattacaatgttgtaagagaaagtgaaagtggcccatcctctccaccccggatacttaaagaagatcgggcggaacgaagactggagaaagaatagccaaagaagtcgatcaatctggtggaactcgacgtgagagaggacatggaggaatggaggccaaaaccgacggacgagctcgaggaagttcagatagaatctcagacttcccaagtcaccaagatagggaaaatagttgacccggttgcccgggcagagttgacaaaatgtctcagagacaaccgagatattttcgtatggacagcctcagagattccagggataaggccaaccttctgctaccacaagttatcgatgtaccccggtttgaaaccagtggcccagaagaagaggaatctcggaccagagcggaagcattagaaaaacatatcaaggagctattggaggccggtttcatacgagagatccaatattccacgtggctatccaatgtggtgatggtcaagaaatccaatggcaaatggagggtctgcgttgattacactaatgtcaacaaggtatgccccaaagattcttatccgatgccgagcatagatcagctggttgacagttctttcggattcagggtgttattgtttatggatgcttattccagatataaccagattcccatgtatctataggaccaagaagagacagcattcagaggaggtgaggtaaactactgttacaacgtgatgcccttcggcttgaaaaatgtcggcgccacttaccagcgtatgatgaacagggtttttgcccaacatctcagtcggaatatcgaggtatacatagatgacatgatcgtcaaaacggattcaaacgggaaccacatctgagacctggaggaaaccttctgcagactgagagaacacaatatccggctgaacccactcaaatgtgcgttcgaagtgactacaggaaaattcttagggttcatgttaacccacaggggaatagaagtcaacccggacaaatgcaaggcagtgttgaatatgcagttcccaagcagtaaaagagaagtgcagcagctaaccggtagattggctgcgctgacgaggtttctcccaaagtcagcggaaaaggcacttcttttcttcaagctgctgaagaaggaagctagcgtcggatggagctcggaatgtgaagccaccttccaggagatcaagagatgtctcgcctctcctccaatgttatctaagccagaacccggcgagacactaatcttgtacctgtcagtaggtgaggagatggtaagtgctgtgctagttagagaaagcggcaagccccaactgccagtgtacttcgtaacccgggctctcaaaaattcagagctaaaataccagaaattagaaaagatggcattcgtgctcttggtggctgccaaacgactctgtccacacttccagggccataccatcgtggtacgcaccaaccaaccaatccgaaaaatcttgcataagccggatttggcaggccggatgatgagttgggcaatccagctcttcgagttcgatttgaaatacgaagcccgacagggaggtaaaaaattaagttatttaccatctcgtgcagctcatgttgcattataaaagccactcggcgcctccaatccaatgccaatgccgattgcatctcccgcttccccaaactcccacttcttccttctctccctcagacccaaacctaaatcccgttctgtgttctgttcccaactaaactaacatttctgattttttttttggagcaaatcccgttccattccactataacctgagcgcattcatgtcatctatgctccaatgaaacagttgaatgtttgtgggctcatgaactgtcagtatgtatcatctgaactggttaccatcatcagaagaatgtctccagacattcatctgatgctggtaaccagttcagatgatacatactgacagttcataacattcaattgtttagccaagttttctgtccacgatctgattgtctccaagcaagaagaaggaacagttctggtgggaataggacaggcagcaggaatgctgttctcaggagaagaggagaccaagcaaaaacagcacgcaactgattacaaaacagtcacagaatacacagacaatggaatactcaaatgcaccgactacaagccttttacagaaacacagaagtggttaaaagcccccaaataaaaatgcaaaagcaaaacaacaggaaactccaatagctttacttcgcggccaagaggagacgctggaatcttcgaagaccacaaaccttcagcaaataaaagcaacgtgaaactccaagccatcccgagaggaattagaggtaccaaacaaaggaatccccaaccccaccacggtggaaaaatccacagggaggcacccaaggagggggggagaagaaacccaagtatagtgtggctcagtcactttcttcttactccacctttttcttttttgtgtatatgtgtatcagcctctgaacattaggtagaaaaagtatcgtgtaggcactgaacattaggtagaaaaagtatcgtctaggcacctagctagcaccaccaagagcattattaatttctgtcccattcacgctcattaacttcaactccgagaggctttttctatctaagaggggtaaaaaattaagttatttaccatctcgtgcagctcatgttgcattataaaagccactcggcgcctccaatccaatgccaatgcctattgcatctcccgcttccccaaactcccacttcttcnnnnnnnnnnnnnnnnnnnnnnnnnnnnnnnnnnnnnnnnnnnnnnnnnnnnnnnnnnnnnnnnnnnnnnnnnnnnnnnnnnnnnnnnnnnnnnnnnnnnnnnnnnnnnnnnnnnnnnnnnnnnnnnnnnnnnnnnnnnnnnnnnnnnnnnnnnnnnnnnnnnnnnnnnnnnnnnnnnnnnnnnnnnnnnnnnnnnnnnnnnnnnnnnnnnnnnnnnnnnnnnnnnnnnnnnnnnnnnnnnnnnnnnnnnnnnnnnnnnnnnnnnnnnnnnnnnnnnnnnnnnnnnnnnnnnnnnnnnnnnnnnnnnnnnnnnnnnnnnnnnnnnnnnnnnnnnnnnnnnnnnnnnnnnnnnnnnnnnnnnnnnnnnnnnnnnnnnnnnnnnnnnnnnnnnnnnnnnnnnnnnnnnnnnnnnnnnnnnnnnnnnnnnnnnnnnnnnnnnnnnnnnnnnnnnnnnnnnnnnnnnnnnnnnnnnnnnnnnnnnnnnnnnnnnnnnnnnnnnnnnnnnnnnnnnnnnnnnnnnnnnnnnnnnnnnnnnnnnnnnnnnnnnnnnnnnnnnnnnnnnnnnnnnnnnnnnnnnnnnnnnnnnnnnnnnnnnnnnnnnnnnnnnnnnnnnnnnnnnnnnnnnnnnnnnnnnnnnnnnnnnnnnnnnnnnnnnnnnnnnnnnnnnnnnnnnnnnnnnnnnnnnnnnnnnnnnnnnnnnnnnnnnnnnnnnnnnnnnnnnnnnnnnnnnnnnnnnnnnnnnnnnnnnnnnnnnnnnnnnnnnnnnnnnnnnnnnnnnnnnnnnnnnnnnnnnnnnnnnnnnnnnnnnnnnncagcaaataaaagcaacgtgaaactccaagccatcccgagaggaattagaggtaccaaacaagggaatccccaaccccaccacggtggaaaaatccacagggaggcacccaaggagggggggagaagaaacccaagtatagtgtggctcagtcactttcttcttactccacctttttcttttttgtgtatatgtgtatcagcctctgaacattaggtagaaaaagtatcgtgtaggcactgaaaattaggtagaaaaagtattgtctaggcacctagctagcaccaccaagagcattattaatttctgtcccattcacgctcattaacttcaactccgggaggctttttctatctaagagggggtaaaaaattaagttatttaccatctcgtgcagctcatgttgcattataaaagccacttggcgcctccaatccaatgccaatgcctattgcatctcccgcttccccaaactcccacttcttccttctttcccttaaacccaaatcctaaatcccgttctgtgttctgttcccaactaaactaacatttctgattttttttatggagcaaatcccgttccattccaccataacctgagcgcgttcatgtcatctatgctccaatgaaacagttgaatgtttgtgggctcatgaactgtcagtatgtatcatctgaactggttaccatcatcagaagaatgtctccagacattcatctgatggtggtaaccagttcagatgatacatactgacagttcataacattcaattgtttagccaagttttctgtccaagacctgattgtctccaagcaagaagaaggaacagttctggtgggaatagggcaggtagcaggaatgctgttctaaggagaagaagagaccaagcaaaaacaggacgcagctgattacaaaacagtcacagaatacacagacaatggaatactcaaatgcaccgaaatacaagccttttacagaaacacagaagtgggtaaaagcccccatataaaaatgcaaaagctaaacaacagaaaactccaacagctttacttcgcggccaagaggagacgctggaatcttcgaagaccacaaaccttcagcaaataaaagcaacgtgaaactccaagccatcccgagaggaattagaggtaccaaacaagggaatccccaaccccaccacggtggaaaaatccacagggaggcacccaaggagggggggagaagaaacccaagtatagtgtggctcagtcactttcttcttactccacctttttcttttttgtgtatatgtgtatcagcctctgaacattaggtagaaaaagtatcgtgtaggcactgaaaattaggtagaaaaagtattgtctaggcacctagctagcaccaccaagagcattattaatttctgtcccattcacgctcattaacttcaactccgggaggctttttctatctaagagggggtaaaaaattaagttatttaccatctcgtgcagctcatgttgcattataaaagccacttggcgcctccaatccaatgccaatgcctattgcatctcccgcttccccaaactcccacttcttccttctttccctcaaacccaaatcctaaatcccgttctgtgttctgttcccaactaaactaacatttctgattttttttatggagcaaatcccattccattccactataacctgagcgcattcatgtcatctatgctccaatgaaacagttgaatgtttgtgggctcatgaactgtcagtatgtatcatctgaattggttaccatcatcagaagaatgtcagacattcttctgatgatggtaaccagttcagatgatacatactgacagttcataacattcaattgtttagccaagttttctgtccacgacctgattgtctcgaagcaagaagaaggaacagttctggttggaataagacaagcagagtcacaagaatgttttccagtctgttcaacgtgctccattatcccaccaatgactacattaccttgtgagtcagccactaaatttaaaagaaacacaagggggtggtggagcatcacagacttcaaattcatagagctccataccactcccaataaaaaaagaaaaagaaggaaaaaatgaagaaaacatggaaaaaatggaaaaattgaaaaaaaaaatagaaatattattggattaatttgtttggttaatttatttaataattataataattttagttaattatgataattaaattttatagtagtagttgtaaaattaatataaaatataatttaaaaaattttattgtttaatttaatataattgaaatttttttataatttgagtaatttgaaaagtgaatcaatttaatttttttaataacacaggtaagttttatttgaaaattaaaatttaaattttaagttgtttgaaaattagtaaactaaatagtaaaataatttaataaatatataaatttaatatttataatacatgaaatactgatattgaatttttttgattttttatgtatataaattaaattattgtaatttagtatattaattttattagtttctaaaagaattttgtaattgttgttagtaattttaaatttttgatttgaatagaaatattgtttgaattatttttttatgtaagtagaatttttttgttacacgaaatgaaataagagatatatttatttatttgtatttatttatttattttggtaaatattattatgttaattaatctaaaattatatttgatgaatagtatatttgaatcatgcgagcatggaattcgaaagactataatcctaacctaaaattttttaaattcaaaattatcttttaaaaatacaaccctaataatattttatttataccataattttcttatttaggaaagcnnnnnnnnnnnnnnnnnnnnnnnnnnnnnnnnnnnnnnnnnnnnnnnnnnnnnnnnnnnnnnnnnnnnnnnnnnnnnnnnnnnnnnnnnnnnnnnnnnnnnnnnnnnnnnnnnnnnnnnnnnnnnnnnnnnnnnnnnnnnnnnnnnnnnnnnnnnnnnnnnnnnnnnnnnnnnnnnnnnnnnnnnnnnnnnnnnnnnnnnnnnnnnnnnnnnnnnnnnnnnnnnnnnnnnnnnnnnnnnnnnnnnnnnnnnnnnnnnnnnnnnnnnnnnnnnnnnnnnnnnnnnnnnnnnnnnnnnnnnnnnnnnnnnnnnnnnnnnnnnnnnnnnnnnnnnnnnnnnnnnnnnnnnnnnnnnnnnnnnnnnnnnnnnnnnnnnnnnnnnnnnnnnnnnnnnnnnnnnnnnnnnnnnnnnnnnnnnnnnnnnnnnnnnnnnnnnnnnnnnnnnnnnnnnnnnnnnnnnnnnnnnnnnnnnnnnnnnnnnnnnnnnnnnnnnnnnnnnnnnnnnnnnnnnnnnnnnnnnnnnnnnnnnnnnnnnnnnnnnnnnnnnnnnnnnnnnnnnnnnnnnnnnnnnnnnnnnnnnnnnnnnnnnnnnnnnnnnnnnnnnnnnnnnnnnnnnnnnnnnnnnnnnnnnnnnnnnnnnnnnnnnnnnnnnnnnnnnnnnnnnnnnnnnnnnnnnnnnnnnnnnnnnnnnnnnnnnnnnnnnnnnnnnnnnnnnnnnnnnnnnnnnnnnnnnnnnnnnnnnnnnnnnnnnnnnnnnnnnnnnnnnnnnnnnnnnnnnnnnnnnnnnnnnnnnnnnnnnnnnnnnnnnnnnnnnnnnnnnnnnnnnnnnnnnnnnnnnnnnnntttttaggtgttttgttttttccttaggttccggtttacgtgtttccagactcgctgaaattttttgcgaagcttgtctcaagcacattatttatttattttaaggatcctgcaaatgtttttctgccaaaaaacaggtttttttttttttttttggaatcgttgtctagatacttgtttttaacaagttttgagcagggaaccattctgatttggttctttttcacaatttgactaggtgatcaatttgcctatgattatatcaaatgatccgtcgaagcttttttatttttttggttcacggaaggaatgtggcaatcagaacaatttttgttcacgatgtgaaattgatttattcacgatgtgaaattgaaatagtttgagtgcatggtccggctttggatttatcatttatggttttgtttttcccttttgtttgaagaaaagaccaaaataactgattataaatcattcttacaataagatttgaaaccaattgatcatggaatgataaaatattcgaagtaacgaaaactatcaagctcaagagagaatagagatatcattgaatgttggggttttctcctcctttactgttgcatcgaattatttttccttctgcctatttaagtttagggaattttatcgtcaatcaatgcttgaaacatagacaagtgactaacatcgatgataatcaattacttcatttaatatagaaatatagaatccggacaacatccataagaatcagaaattctagtagcacacaattctcacactattaataatcatcacaacttaatcaatcaaacatagtcgtacatttactgaagatttataaatgggtaagattatctttttgcattgaattatggcttacccaagattcagaagaccagcaaccgtactaatgctaatatcaaaatccactttaggctgaatgatgaagttcccttctttgataggctgacacatgtacaagataacaaagaaaattttcaaagaaaatagatcaccaaaatggcacagtaactatacattgacatttataattgtgttaaggtatcaaccagcaaataatgggaagataaaaatatttccaacctctcgtatcagcaatgcaaatctgccttcacatattctgactcgaattcaatcactatctctctaacttcccattagaagggatcccaggaagccttatataaatatcaataaatttctgctctgaactgcaaaattttgctgaatcaagaattgcaacaatatcttgatatgctacctgttatttatttctatcttcagtaaacatgttgaacaaaaccttgtcacataatatatatagatagataaaaaacataaaacttacttttttgttactctttaatacaaataatgaactctcaggagaaagaacagggtcaaagtcatttggaatttttaagctgcaagtcaacattaaatgatgatgtgtcatatatgcgtcaattctccaaaagcaacaatttattatccaaaataaagaaaactgaaacaataatgcaacaacatggtgacaggtgagagcagcaaatagaaagggcggactataaataacaaccaaaataatcaagttttatattgttattacttattacagtaagtatttctcaagattaacacaataacatattattgtaaagtaggcatagttagagagcattataaaaggtaaggaagtgtagttttttacatggatcgttaatggttcaactgacaaatctaaaatcatcaagctttaaccattaactcctaagcagttttaaaatatagagggaaaagcatactatccactaacatgtgcatgaacaagatgaggttcaatgagctgctggaacatagggaacactgtcatcacgatctcattttgggaaataaaacatgtccctccactcttatccctttgaactcgtgaaatcaaatgtgaatgaacacctccaacctgtttccgataagaaaatcaaagtgagaggcttcctagccccaacaataataaataaaaaaatagatgaaacagaaaatggccttcgaagatggagactcattcttgcaacagcaatccacaagtgatattcgaatatcaggatgcagagcataaacgtcttcaaatataatctggtcaaaattaacagatagactctcaagaaccacattgaagaaatggaataaagaactagcattacatgactagaaaactatatcaggaattctgcagaccaaatatataaagaatgtcaagttatcatgcatatatgtacttcatttttttggtatccttgatttgtgagaaaacaggaaacaagtaaaaagtggatagagacaacttcttagatgcgaagtgtaaatagtacagttcaattttgggacaaatcaattgctatatcccaaacccagtgtgacgtgggatttcaaggatgcagcaatcacaccatacaacagtttgtatctcagtgtatcaatgactccctttaccagatcaatactgatttgattcttaggaagcacttttagcatagcatcatagcctgcaagctatgaagggttaagctctaaaaccatttggaaactgtaagtgttatttactgtaatgttgtgtgtcaaagatgaccacactaaaaatcctttatttataatgagcaattaggatctacattaattacatagaatcaatctaatctgagtgataatgaacaaatccctaatttctctctaatcataattaacagaataatatgtaatcttaacactctccctcaagcacgagcaatatgtcatatgaaccgagcttgttacaaaagtggtcaacccgatagaaactaaatgcggttcgagtcatgtggttacgtcggataacatcgttcagtggtagccaacaaaggcccgcaatgatgatggagaccagtatgacactcactggaaatacgttgcgtgtcttgtgcgtgaacttcacgtcacgcatcaggccctgtatgaggtcgcatgcaatggtgttttgagttggctggacacgtgaacggcgtggcggttttcgccgatgacatgtactgttcacccataaaaataaaaataaaaataaaaaaagcaaaatggtccactagggacgcctcgagacagagggagagaagaccagggtgacactggccgaagatccttcacgcgtcatgtgcgtgaacttcatgcactagaaaagggccttgcatgggtttgcatgcgacagtgttttgagttggtttcgcatgtggactgcgtggcagtcttcgaaaaatggtcacccaccacattatccatgcacttagtccaaaagttttactgggcgtgagggggtgtattagaaaaactcaagtccacatcgactagagataaggtcaagatagaatatataagtgggataccctatgagctagcttttggaattgagttagactcaaattcacattcttggagaaactcctaagcagctattggcatggtaccttcaaagatataagcaggtcaaacaaatattagagctaagaggctaagacaattccaaggcctaataacttaatcttttggaaaagttgtccactaacatgatatcaaacttcgctgacaaagttatccggagtttaattcttccttccctttcttctagttaaaatataatatcagaaaaaggttcaagcaagcttgccttttgttcaaactttaagcccaaggagctttaagaaataaaaaaatattcctatgttggcaattgaagtcgcatttggaaaggttggctattgacagaaaaatgactatctcaagttcagcaataatccatccccatgtcaatatttagatcagtgctgaattcaaaatctactaagatatgttctcatgggatttgtaaaaatacaatgcaatgaagatagtatcttttcaacttcaggctattctattaaatctcacaagcaaagttataatggaggaaacaaatttcaggcattggggaaactagtttaataactgaccactccacaatcttcagaaacttcaagttccttgaagccactccgagcaccactttccaagtcaaatataggtactttagttctttgaccatttcttatgtcatcaatattctccaagggactcaagaataagactgttaaataatccattcgtaacatggctgaaaatatccaaaagctttgactaaccaagcatttaaagcaaagagatattnnnnnnnnnnttgaactaatctaacattttaaacagttttgtgcataagaagatcttgaattttatagatcccatttttaattacatagtcattaatgggcactttccaaaagattgtaggttattattcaaattcacaaacattaaaaaaatagaggtttgatttttaattaaaaaaacttagagcaatactaattagtctaaaatatgtttttatatctgataaatactccaattttatatttttcttaatatttgtttctttacattaattccttgataaaataataattttgtttttcataattgacattttttctattccttaatatattaacgaattttatgtttgttatttgataaaaaaaaatcatttattattagtctctttttacttatgataaaaacaaatgaaaaaaattatcagaaaataaatataaaatttattaatttatcataaattaaacaaatgtcaaagaccaaaaataaaattatcattttattaaaaacttaatgcaaagaaaaaatttgtctagaaacaaacacattttattaatttatcaaaaatagctnnnnnnnnnnatatatatatatatatatatatatatatatatataatgttaattataagctttaacaatatttaaaacaattttaaaaaaggatagtttttagtatatatataatcaaatcaaatttctcaatatattgttttgcatccttatggatagtctccgtcattttttttatttataaaagtgggataagccattacatttaaattgctctttgaagaacaacaccaataaaatcctgccaaagcaattagaatgttttatttgaataatcaattaaaaaatctaaaaaatagtagaattgtttttacagcaaaaagatagaaagatgtttgcaataaaaaaattataaaatatgtatgtagaaaatgatgatgtaaaatatacataaatgaaataaaattacttgctatatttaatattcaaaattttaatatatttttagaaatattcaaaattattttcaaagatatacttgtaaaattttaaaaaaatatattaaaattataataatataaattttatttatttttacatttataaattaacacccttgcatgtcacatgttattgcactagttctaaaaatatcatcatccagaatacttttttcatttaaaaataatagtcataagttgttttatttaaataaaaaaaagtgataattttaaaaaaaataattttatataatcattaatttttttattcactattaatatcataagaaataaatataaaaataattgatattatataattttaagatttttattctgatacaaataaaataagataagttacacatttcctcaatatcactgatcacaaaacaccaacttgccacctttgtaacacaagccttgttccccagtagaatccaccaccttgccatagctatatctcaaaggcattctccctaacaccctatgaaactccataatgcaccaccctctcctctttctatgctcccctttcctactactcaaccccaccacactcaccccttcttcttcactctcctcttcatttctggcatcaccataatccctcactctctttgccccgaccaaaacgggccccacctccgcctcctccgccacaacaaagttcatcagtatatcctcgcagttttgcacctcgtccacgaacccccgcacgcgcgccatgcggggcccaccccggcacgtgtagaggaacaggtagcgtgtctttaacaacatgaacttcgtgagcacgatggagaaccgatccgggtggaccgtgtaggcccactccctccggtccaggtcgaaatcatgcgaccgcgcgaagagcccaactaaccggtgccggttttgggtccagatgcgaaacgcgaattccaaggttgtgggatccacctccacgtcgtcatcgcagaccaaaacggcgtcggtggagatgtcgttggggcgcgggaggaagcggttgttgaggctggtggagggttgggggagaagtgagattggtgctgagaaggaagaagagagggtgaggttgtgggccaattggtgaaggacacgtggcgatgtggcagggttgccccagaggacgagcacggaggacacgatgggggagagggagtacgaggcggccagggattggagaagcgggatgcgggactccgagaagccgttcatgaggacagtgagtttgtcgcggcggaggatctgtaggttctgattcggttctggcacgcattccggtgggtctggtggtattgttgcggttgaaacgacgctgattagggttgcggcgaggaggatggccgtcgccggagaagtcatcgatcggttgaatggcttttgaatttccgaattcggtgttttattatcaaacgaaagtgggttcggtgttgacgcacgatagatagagtggcagtgttgttattttgtggaaaactgagtttaaagatgtaaactcattagctgcaagtgtgttgtgtgtgatcgtgaagatcactgagcatttctagagtatgatattccatgacggattttacggtgcgttaagtcaactacttaagtagcgtgcgaaagcatgaatataccacgttagattaaatggacaattcagattgttttcttttttcatttttcttctttttctttttctttgtctatcccgatttctccatactccttctctctcattccattcatccaacttccgtcgacaccgcgacttgaagtcgccgtcaacggcaacacctccaccgcttccaaacatgcatgtcaccggcagaccactgcaattctgcctccactgccgaagaacaaccttcttcaaatgcattcttctaattttaagaacgacaatggcggttcaaaaacaatgcactataaagcagacaaaaaagtatgcagtcattctttgaccaagttttttaccgcacattatcctttcttcctttttttttttatattttaaattgaagggtgaaggtgagaagagagagaattttaagggagattaaattattatttcctttttatttataaatgtaaattgaatatgcttttttctcattactctgtgttatccatttcttgatttttgcaaattgcaaattttgaagcgagttttgtgattcattcaagctttatttgatctactctgttgttaagattgattacaattactaggtgagtgctccctcaattgaactttcaaatcttttgcaatgatattcctcctagaaaagtataaaattcataagttgattcatgaagaagatggaaaagaaaaatgttaagcttacagtgagggacaaaatcccagtgataagccttgttttcatgactaggcccagatgacttccatgaaagagcaacatattccatgatggaggatttattccttgttgcaattttccaatctagcaacaacatcttcaaacagacacctttgtttagtaattaagctgataatgatttgtggctaaaacattgttagtgccagactaatgaggatttcatacgcaaatagtaagagttgggtgggaaccgtaacttaccacactgatgccatgattttgagccttaattgcaaaaaccaagagggtagagatcatgacacacataagaggagctccagctgagaccagaatacctttggtttcctaatgctctgcatgcatttatttccatatgagttagtcaatactaccctgcattcattttgagagaagttaccataaacatgtttatgtcattttaatctttttgtttgaactaatctaacattttaaacagttttgtgcataagaagatcttgaattttatagatcccatttttaattacatagtcattaatgggcactttccaaaagattgtaggttattattcaaattcacaaacattaaaaaaatagaggtttgatttttaattaaaaaaacttagagcaatactaattagtctaaaatatgtttttatatctgataaatactccaattttatatttttcttaatatttgtttctttacattaattccttgataaaataataattttgtttttcataattgacattttttctattccttaatatattaacgaattttatgtttgttatttgataaaaaaaaatcatttattattagtctctttttacttatgataaaaacaaatgaaaaaaattatcagaaaataaatataaaatttattaatttatcataaattaaacaaatgtcaaagaccaaaaataaaattatcattttattaaaaacttaatgcaaagaaaaaatttgtctagaaacaaacacattttattaatttatcaaaaatagctnnnnnnnnnnnnnnnnnnnnnnnnnnnnnnnnnnnnnnnnnnnnnnnnnnnnnnnnnnnnnnnnnnnnnnnnnnnnnnnnnnnnnnnnnnnnnnnnnnnnnnnnnnnnnnnnnnnnnnnnnnnnnnnnnnnnnnnnnnnnnnnnnnnnnnnnnnnnnnnnnnnnnnnnnnnnnnnnnnnnnnnnnnnnnnnnnnnnnnnnnnnnnnnnnnnnnnnnnnnnnnnnnnnnnnnnnnnnnnnnnnnnnnnnnnnnnnnnnnnnnnnnnnnnnnnnnnnnnnnnnnnnnnnnnnnnnnnnnnnnnnnnnnnnnnnnnnnnnnnnnnnnnnnnnnnnnnnnnnnnnnnnnnnnnnnnnnnnnnnnnnnnnnnnnnnnnnnnnnnnnnnnnnnnnnnnnnnnnnnnnnnnnnnnnnnnnnnnnnnnnnnnnnnnnnnnnnnnnnnnnnnnnnnnnnnnnnnnnnnnnnnnnnnnnnnnnnnnnnnnnnnnnnnnnnnnnnnnnnnnnnnnnnnnnnnnnnnnnnnnnnnnnnnnnnnnnnnnnnnnnnnnnnnnnnnnnnnnnnnnnnnnnnnnnnnnnnnnnnnnnnnnnnnnnnnnnnnnnnnnnnnnnnnnnnnnnnnnnnnnnnnnnnnnnnnnnnnnnnnnnnnnnnnnnnnnnnnnnnnnnnnnnnnnnnnnnnnnnnnnnnnnnnnnnnnnnnnnnnnnnnnnnnnnnnnnnnnnnnnnnnnnnnnnnnnnnnnnnnnnnnnnnnnnnnnnnnnnnnnnnnnnnnnnnnnnnnnnnnnnnnnnnnnnnnnnnnnnnnnnnnnnnnnnnnnnnnnnnnnnnnnnnnnnnnnnnnnnnnnnnnnnnnnnnnnnnnnnnnnnnnnnnnnnnnnnnnnnnnnnnnnnnnnnnnnnnnnnnnnnnnnnnnnnnnnnnnnnnnnnnnnnnnnnnnnnnnnnnnnnnnnnnnnnnnnnnnnnnnnnnttaaagctatgattagttctatcttttaaagtataactttctcattttcgttatgactattgattttcggttcatgcacaagtccatactccacacacacattttatgacgttgttaaaatcttaattattaatttttcaattacaggttatttataattatatatatatatatatatatattctttaaagtataaatttcttaatttatgttataaagattgatttatgcacacgcactcatgtgtatgcatgcgcacagacacatatagaaaataaattataaaaatattaaaatttcttattaattgtgtaattttttaattttataaaatataaaaattaaataattaattaaaattattgtggagtaattaatctttttcaggtaattgctaactttggtcaagaaagttgttaaattgttttatagtatttcttatttgtcaagtgaagaacacaataaatattaaatatttttagattttaatactattaaatgcatttattttttatttttcatgtaaaaacatattaaatatttttataaaataaacaataattaatataaaggttattataaagtaattaatttctataaaagaaaagactgtatgatgtacgggttcaagatagtaagggatgaacttaaagttcacatcatggctatgaatccactgtgtcagtggtccttaaccctaacccatgtgtgtgaaaattagtacctataaatataaaatatataacatagaatactatgttactgattttgtcatatttcttggaagttaagaacttgttaagggtgacttaagtggttgttagtgtgtgtgagaatctaataagacaaaaaaatgaaaggaaaaaagaaaaaaagaaaaaagagaaagaaattattgtaggaaacaacatataacgcctcttgctaacagtagtatagcaccaagaagcaaatccccatcaatattgtttgccatgaccactgcataaaaaccacagaaaacttttttgtaaggtagagtccattttagtctagagacaaattaaagaactgtgccaacagtcaaatcaaattctgtgtctcgcgtgtttgtgctaaaagttaaagtagttacctcatgtatattgtgaaaaacagaagtcataacaggcatcagacccatctgattagcgaaatgtgtgattacaagcaggcacttgagctgttgcagtgagcagctccagccatgaacccaataagaatggccttagatagaaaatcaattatgaagcctagcctgaaaccattaaaaccaataccttgtcttatattgtcttatagtagtatatcagaatgattcttcattcttgtacttcttcagattgaaaaaatattaatcataatcaaaaattacatgatatggaaaggactaataattctaaatttttttatcagaaaatattaattgttaatttttttgttaagaggaaggatagaacctaaggtatttttatcattttcttctttcttaaccacccaaccaacctgatatctcctactaataactctaattaccttaggattccaagtgaagcttgaaagagaccagcaaataatgttgaagtgaaagctagctgaagaaacagaattgggtctgttgtgggagacacttcctgcctcaacatggatcccatcacaagagaagcaatagaaacaggtccaactgcaaggtcctttgagcttccaagaacagcatagacaagtggaggaacaaaactagaatctgaaatatgaaacaaggccaatcacaataacccataagcatgtgatgtaacataaattagcaccaaacaaactaaggagataaatcagtacacttacaaagtccaacaattggaggaagacttgcaagctttgcatagctaattccctgaatgacaaaagtaatagttgaataagaaaagcaagttaaaaaatatgagtgaacattttttatgtgagaacgagtttgagcaggattatctccaaggaagaatacgtgtcttattttgtataaaaaaagaaaagaggcagagtgagaacttgacaaaacctgtgggatggccaagctagcaatagtgaggccagaaacaaggtcagatttgaagagtttgagattatacttaggaccccattggagaatagggaacacatattgagctccaaagatcagttttctcttaagaggttgtcccttgaattggcgcagaggatcatcagggaaaaaagtttccttgagcctacccttgagtttctgaagggtgctcttgtcagtcttgtggggtggggtcacaacttggtgcacttacatggacatctcaatgcaatgagaatgcatagtacatgcattattagtctccattttgaagagaacagaacttatatgagaaaatggtgtgtggtgttattacttattattattattaggcttcttagcttcttattgtggtttgaggagtgatgccatttatgtgaggctctctctccctgacctacccttgtaatcaacacgtccgcaaaaccgctaaaaacaagatcgcacctatgtcagctaaagtacaagaggataacaacaaatattgggatgtaatttcagaaaatcaaaacacgagaagggatagcttagcgggagctgtgcctgaagtgggcatactaaacggttctgctgctaaatatattctacacacactcctcacaaatttggacacttaatttttttcaaccagagaaatcaggtcccacggtatttattcaagtcatgttacaattcaacagcaagtcatcaatttgagtgagactgagtttggttttttaaataaaatattgaatttcaattttataaatgaaataaaaagtaattagaaagaaattttttattaaaattggctgattaattagatttttcaacacaattaattattaataaaattgataaatatttcacaccaacatattattatttaaaaaagtcgtgttaaaattttatatcacttctgtgagactaaatgcttaagttgatgagtgaaatcaacacttactacaacattcaacctccactcgaacattactgacataagggacatcattagcaaaatgattttggctcacaaattcataccaacgtgacgtagttcgttcatgagtttacgtggcatcattccttaggcagagttctggtctcaacaattgccgtatttaagaaggaatttttgcttcgtatttatcagcatcttagcacaatttgattcaatttttctcattacttggattgaatgattgatttttttttttttttccgaatgtatgtattattattagaccaattccatatccttagtttgggccttcggggttgttctccatcatatagaaatcatttattcagataaagccacatataattaataagctgtctgtttgattttttaggttaaatttgtttttgcctttaatttattattaagttttaatttggtctttaattttttgggttcaacttgattctctaatttttaaaatcaatttttttggaaaatgtacattttaggacaatttaaaaccacttagaagtaattttcatcggtcataaaatacaatttttataatttagattgaagaaccaaattaaatcaatttaaaaaattaaatgaccaaattgaataataaataaataaattcactgattttaccttttttatgtatgtattaagaccagtttcatatattcactaaaaaaacgaattccatatctttgggggaaaatatatagatcaaattggatataatttttataagtaacaaatctctcttcaaaatatttaatacattatatattgatgattcaaactcaaaaccaattattaaattagaataattctgcaacatttgaatcactcactcaatgaattttcttcaatcatataaatatcttttatttaggtaaagccacatacgcagtaaaaaaaaatagataaagcaacatctaataaacatatttttgaaatttctagttatatagtcagtatacttgcatataaagtgagaataattcttattttaagaaagtgacaactataaatttggatcatcatacaatcgtacatgaattataaaaattaaaaattatttagtgattaagaaaattatgtatatttttctttttaatnnnnnnnnnnataaaatgcgcgaatagaaatgtgtactatatgtaagtcaaatgtcattcttactataaagatttattaaagattcagcttttctaaattaaatgagaatacccatatatcttagatgaaaaaacatgaaaacatacacatataaaattaattattaattttttaatgagataaataaataaattattaagttgtaaaaatccaaataattaattttgcgtgtaattaaagctatgattagttctatcttttaaagtataactttctcattttcgttatgactatnnnnnnnnnnttcttattttaagaaagtgacaactataaatttggatcatcatacaatcgtacatgaattatcaaaattaaaaattatttagtgattaaaaaaattgtatatttttctttttaatagtaaccatttaaatattatctatatttttctcaaaagaaaaatatctatatttatttctcgtttctcatagtagaaagtcctctcatttgataagttgcctattaatatatgtatttatcaacagtcaaatatcctttaactttattaagttattataatattttaatgaccaaaaatatctaaattattgtttatgcacacgagtttttgtgttgcgcgtttaagtttttcaacacgaaatataccaagagtatgttaacttgaataataatttcaatcgtttatttgtatactaccgttataaattgaaaaataaagtataaaatattggtatatgtaaaactataaatttagatttactgaaggaatgtgagtgtatgtaatttactaaaatatttcggagaatatttgtccaagatattttctttttcctgctaactgcaatgtgactatgcaatgccgtttagtgtcgccaagtctatagcacactcgtatatatgattttgtcttggcaaaaaatgacaaataatataaataaaataaaaaattaggcaaatggtataaccagaaaataatattaatttagcaaaataacaagcggacatgtttaaacacgcttaatctggacgtattgggttacaccaatttgtcaaattgttccaagcttgcaccatttgtctaatttttattttatttgtattatttatcattttttcccgtctattctttcatgttaaatggtgcataaatttgtgaaaaattaatcctacttatatatatatatatatatatatatatatcagtgaaataattaaatattactacttgattcaattacttaatttgtcagaattaaaaatatgactaattaaattcataatataaaatttatcttaaatttatatatattttccaaaaacatatgatagtcattaataattcttgtgctcttctaaatatacgttaatataatttctcttctatttaatttagaatatattagattaaaaattaatataaagatcataatgaattgagtataaaaaaaacaaataactttaaaatttgagttttataaattgaaattagtattagctattctcccaataaagtatagagatttgcgcagaattcggagttctattatactcctgtatagagagtgcacgggcatcttcttaattgacagcataagagtcgtgcaaagccaaaacacatttttaaaattttcttctgtagaattgtccttgtctttggtgaatggattggtgatcaatgctattcactcttctcatgcaagcacaaaccacattgagcatattgaaggaatgtaaatagaagtcatttatttggggggatattacatgaacacagatgcatgtttctcatgtattaattcatacgtacactttttttgtcaatgcttggcattcgtaacacctgcagcacttgtaaacaagtacaatatatcttcatcactgttaaaggtaggagtcgatcgaagtgggttaggtgttgttaccgaaagaatgtattactttttgttgaagacaaatcccaaatagtagtaagtcaattgcgtgctgtaagcatgcatgcttgattattgatcctgggaagaaaataataaccattagcactgttcaatgttcaattgaaactcaccttaattaatttcttatatctataatttgaccatactgttcataatgcttaccacgggggggtttcttcgtactataacctatacaagctagatgcatgcatgaactatgggaagttaatgttgcttactctatcgtaagactatgccgcaagttttattgagaccttatgtataacttgccaataaagttaactcacaataatctagtcatggccgtttttggaaatttgttggttgagtttggatattttttcaaattttggtcatgttattggtggaatcggaagccagagatgccagtatgaaagaagtgagctttaaccatatagttattattctttttgacaacatgtatttttcatccagaaagtaattaatcatgctagagttggataaaattaatatgagtgacatgcaaaactgattaaactgaaataactttatatcagttaatctgtgtgtttagtaataccatataaaataattaaaatggatgagtaggattaaaattaattaaactagttttgattatttgtatataatcataaaaaatgataaatgtttattattttttaacatgaaatacaacgtctttctgttttcaacatgtttttaaaaacgattttgcaaaaagttttaaaaattaataaagttgaaattcatatttagttttttaaaattttatatttaatattcttgctatatattaatttctatataatatttaaattaaaatataattagtactgtaatatattatttattttaaaatataactaaataaattaaattataaaaaataataaaaaatgaggcatattcgcatagatttcccaattcttagattgataggattggattaaagttttcattttcatctctccaaaacacaaccctaagcttgccttgccgcattcttagcaggagcaaagataggaaaggaaaacgcatcccatctcgccctattttgcttaaaaatgaacatcaaattgttaagacttttctttataacgtggtagccctatacatgaggttgttacttccaatcacctccaagttttttcttgtaccttttccaattattttttatttttttatatttcggattggtcattcctaaagccaatatatgtcatcattctggaatgtaattcacatttcagattgatcattccatcttttacagcttgaacatacgaaacattttctctaacaattcatccatatgaaatttttactacaagctcaattgtttcccttaatcattaatgttgttccttcattgtgtcctcccatactttggaagaataacgtgcatcttcagaaaacatggtcaagttaatattccatcttcttttgttctctaactcacacaaaacctgacagcctttttattttcaaagctatccttctttcttaagatatagactttacatactcattccatttcgcaaacactcataaaatctccttcaccaaagcattttgcaaaaatttagaagaattattttatttttattttgtatgattgataagaggacaagctctcacataatgataaagttgtgtcttgctaatcatggatttcgaattggcaatggatacatagtttttttttagttttttttgtatggttgataaactaaagtgacttttgaagtgaaagcaaaatataacttggaagtcccacatacagaatcaatgatctatgcaacggattgattttacttaccacaaatttgcaaccaaacatgtgttactgtgaaaatcaacatgcttcagtgcaatgtgattcaaaatcaattttaaatgccatccaaatgaccaacgtaatttgtgagaaagtaaaattttattttccctatgaaaaaattaatgttggatgtgaaactcatcgtacacacaccttgcctgtgcagatgagtttcaaagcctcttctgctatttagatgtgtaggatttatggagttccaatcagttaaacaattggatggttgttctacagccatatatgaaaatttcatctcaagatccaaaagctgttgagaccatttaagcaaacaagaattgtgcactaggtaggactagaaaggaaaacggaatactactctttaacatgtctttgaatctggatttgagagtacatgaatatataaacagtttgctttaggattatagtaaaggtgtgaaagtgtatataacccaatacaatatataacacatacataaagatattattttgagagcagcatccttcatcataaatgtaggctttctgaggcaatgtcactcatagaaaacccatttgatcattaagtgattgaggtattcctttttcatttttcattttctcatcatgttaaatcatttacattaagggtagatgcaaagaaaacaaaaggccatcactagcatttggtggcacattgtttcaaaaaatcaccatgtatcatcctcatctactgcctatacattatccttttagctgctataattagtacattcgcttgttctacaatgttcattgatgctcctaacttgtagaagattactaggaatgcaagtaatgtgaagaatactcactatcctgatgaatgtctccatgctcaacacctccacaggcactaataaccgttgtatggatataatcatccacaacaaaaccttcagcttgcattctatgcatgagcttcagagcctctctagcatgcccattccttgcataagccaatatcatggattcccaagaaaccacattcctctctggcatgttgtcaaaaacttgaaaagcatcagcaacatatccacattttgaatacatatatattaaagcactgtttacaaatacattagacaaggcaggggtcttgctcgcgtaggaatgaattaactttccttgaattggagcttccagttctgcacaagctttcaaggctgacgagtaagtataggaattaggcaacacaccttcttccatcatttcctgcaaaaactccagagcctcatgttcaagcccgagcctggcacaaccagagataatggcagtccatgaaacaacatccctaaaaggcatatattggagcaccttgaaagcataggagtattctttacatttgcaatagaaccataccaaagtgcttcctacatatatgttagtatggatattacttttaattatctgtgcatgaacttctcttccaaatagcaaagacttaattgtgccacaagccatcaagacacttaaaactgtcaacttattaatatgtattcttttcatcttcattaatcgaaagaagcttatggcctcttcaccaaacccatttcgagcatatcctgatataatagaagtccaagtagctgtatttctaattctcattctatcgaacactactttagaattcaccatcactccacattttgcatacatatcaactagggaagttcctataaaaacatcactcttgcagattttctttattatgacaccatgcagctgtgtcccaaatttcaacgctttgttctctccacaagcctttagtgcactacatatagtatattcattaggatagaacccatcacttagcatttgtgacaacatcgacaaggcttcatgtccaaacccttgttgggaacaagcagtaatcatagttgtccaacatattacatctcgctcagccatacaatcaaatgctcgaaatgcacttgatatattgccacattttgcataaaagtgaacaactgcattgtcaacaattaaattcctccatctgcttttcaaaatacgagcatggatttgtttcccaagctctaaatccactcttctaccacacaaattcatgatacagacaaacatcttactgtttgctggaaccccatgattaacagaatcttgaaataacttaaaagcttcatcatccaagttaaattttaaatatccatcaataatagcagtccacgtaactgtattctttcttgacattccatcaaacactctacgagcctgagctaacttacccaatcttaaataactacaaatcaaattgttatcaacataagtaactggatgtataaaaaatttcaagacaattgtgtgtacccttcctacttcttccatattataacacaattgcagccaatgagctactaattctggattgaagcattgacttttctcagctaaattgtctatcttccagcagaaagcatccgggggagacttgataatatcttggaaattcaactctgcagcatttagtgcctcaatgctttcagtagcagcatcgtagacttttacagcagccaagcatgtgttccaaagctttatcaaatcttgtcacataaacatatggcgacaaataccagattaattgaagaggcaagtttgaactacccagttaaattgactaatttcttgaatcttaacatgtggcaagtacaataagatctctatattgcaaggacacaaaaatcctaagacacatattatcacagtttaacctaggctaagactaaggtagacgaatacttgatgagctatgtttttaaaggaagaattattggagaaatgggaatgaaaatggagtatgactctgtgggagaatacctatgatttgattatagaaggcaccagcatctaattttagttgtagtaatgaagtattaaaaaagctctgaactggagggatatcattcagttcagtgagtgaccaaatatttgaaagcaaaatatactgttatagaaaacactaattcagaattcaaagcatttagtctcaccattttgcgcttcgagattgtatccataagattcagctattgtatgaagatgcataaagaattcttttgtgaaatctttacgactgctggagacaatttcactaattttagatggattccctttgatcatttcgataagttcattgtgcccctgcaactctagatctatctgcagaaggagtattgaataaatttgtgcattacggaagccataaacaacaatttaaaggaatggtataatctctagatatacaatgtttccttgcatcaatcacatttcaaacatctttcccctttcattattttctaattgatgtagaaaacagtacaatgcgctatgaaatacagctacaagtgtgtatattacattaaagagaaatgaacagttatttcgggggtgggggtaaaggttagatagaattgtgccagattgtttttctttagtcactaataccataatgaaagagtgatgggtatagaatttcaataacaaatgagtaatgacagacctctttaagcttctttccaagccagagcagcttgttcttcgtcaccggattgtcttctgtgtctgctttatcctgacagtgtctaaaaaaatggggcctaatattattccattttttgttgaaaactaacagcctcctccaatttctctcgtcaaccatgaaagcctcgattagcttgtcacaatctctaatgatcatttcatagttattcaagaaccccatgccatcttcatcatcatcccttttatcatcacaataacaatcaccactggaggcaccggtacatgataacccttcactgatacaattcagcactgctcttgtgtcacgtgcagtgactggaatggaatgctgctggtctgcttgaccaagaaacaagttagcattacaggaattaggatcatctcctgtcacacaccatcaattcaagagagacaaatacaattatgttgcaaataaacccatcataatgcataaagaaggttaaatattcatttggtccttatagttgtcttcattttaactttcaattcctatacgagaaaactgtaagtcttagtcctacaaatgcataaaagttaagctttgattcctaaagtcaatgttaatgaagctacaaataatctttttggcgatgataaaccgctacaaaaaagaaaaagaaaaaaatcattgtctaggaactaaaacttaacattctatcatacaaggactacaacttagaatggagacaaatacaaggaccaaatgaatactttaacccattaaaaattatatttataaataattttaaaccctctaaaaactccaatttttttcatttggtcgatcaattttcaaaacagttttgctaagccttaaagacggtagctattgaaatcaaaaatagaattctaaaaatgtaataacatttcaatgttacaaagacatccgtgaaaactttgtacatatattgattccttaatcacatcaaacccgtttataaaaaagttactacataatctaatcctcctaaaaaatggttaaattagttttttgtcctctaatatattatttaccttcctaacttctatcccaacaacaatacataatatataatgcagaaaacaactaaaaagaaaaagaaagtggtgtgtgataaaaattgaagttgaaatgtagaaactgacctttggaaacaaaagtgaaacatgaaagtcgaagtgggtttgaaacgaataatgagaagggggaggcgaaatctggagtgcgtttgagagtttgaaacctcggaggaaacgaagaagaggattgacgaattgcggtgcgtaactccatgtgtgaagtaaaaaagaagagattgtggtggaaaaggaagaggcaaaaaaaggtttgtgttttacttctgagttctgagctggtggtggtgaaccaaaaaaaaaaaaaaattcaaataaaataagaggttgaaagttggaagaagtagaaaaatatctcaagtgtaggattgattttgtattgaggttgtaggaaataggaaggaagtgtggagtggagagtgaagtgaatggagtatctaaggagtacaaaaaaaaatctagagggaaaaaggagctgaactgagttcagacagggataaggaggcttgccacctcagcaatgtcacttagtaataaatatactttaattgtattttctatttctaatttttttaatgtttgacgaattttattcaattttaaaaaaaaattgtgaattttatcctttatcaaaaaaattgggaataaaatttgtcaaaaaatttgagaattttatcctttatcaaaaatgtctctcataattctatgtaaaatacaattctatcaaactgaaatatatacactctttaaattattattatcaaccaacaaaggtgaaaataagtaatagttgtttgttatccagcatttgaatcctaattttgatataaaataaattatgttgggagaaaaatattaatgtgtatttttagtgttttcaatgaatattaattctgactttgagttattttgtactaatatcatcattatccaataaaaactattcttgtcagcctctgatttgagtttgattttgcatcttacctaatcagctactcctctatttgtttacgcctttaannnnnnnnnnnnnnnnnnnnnnnnnnnnnnnnnnnnnnnnnnnnnnnnnnnnnnnnnnnnnnnnnnnnnnnnaggtaggttccaaactgttttcagccttcatacacagaatgttacaacctacaaactaacaagttaaaagaccttaaaagtttcaccatccatgattgatgattaacccaacacaacacttctttttgtcttcatttctgtgcctaaaagtcccttcactgtctcctctcttatacctagctgtctctctgctctccttgtttgttgttggctctgaattctaagaatgtgaaatttgtcaccctctcattcccacccttcagagatgacttccctcagagaactcctctcagaagaaggcttctaccaaacaacccctaacaaaaacaaccctttgaagccaaagctcaaactctcaccaccaacaccagagataatactaaactcactccctctacacatatgcaatgacagaaaaagccttgttgattgctccaacaaaagcatagacaagtctatgacaagaaaagggtcttggtcatttcactccaatactcaaagggttgttgttggttcagtttctgaaacttcattggtgtcaccaccaccaagaactgttgtgggaccccccatggatgaagttgccacaagagcagtggttgctatcctcagtggatacattggaaggtatgtgaaagatgatagtttcaggaaaatggtaagagacaagtgcaattcttacttggtcagaaggagaagaaacggtttaggatcatcatcggaagaagaaaatgaggttctgatgaacatgaaactaggcatggagaatattgacaagttggtgcaggatcaagggacaaagaaagagatgaagatcaaaagcttgaggaattccattgagcttttgaccatagttgcttcaatgaatagtaaaattagaacaacatcaagggaaagtggttcaacttgtggaataccgaattcccatatctctgcttgtgctcagctctacttggcaatagtttacaagcttcagaagaacaacaggatttgtgctaggcatttgctgcaagtattttgtgactctccgtttttggctaggacttatttgcttcctgacctttgggagcatgtgttccttcctcaccttctccatcttaaaatttggtatgccgaggagctcgacgcagtttcggcctcaagtgaatgtcaaggtgagaaggacaagaaaatgaagtccttgagcaaggtgtatggtaacaaagtggacacaggaactgctatgtttgcttcgtattacaagcaatggcttaaagttggggctaatgagcctcctcttcctattgtccctttgccttcaagaccaagtcgcggatcatcaagaaaaatgtcttcagattcttttgttttgcattcctctatcaacacaaacttgtaagtgacatggacatcttgcatttacttgtccactcttgttatcttttcacaagaaacaaatcaagtatatggtagttatgtgttttctgtgttttggctgttgcaatagatacaaggaagtatttggccccaaactagaggtgaaacctaccactctagctgaacaaaatggattgttgacaattagatggagctcaaggaatgatgaatacagctgcagttcacttcaggttagtttgagtgtcttcaactcatagcagatttcaaatataggaatgcatttcaaactaatactttcattttatttctcacctttgacagaaagaagagacaatataccttggaagatcatcaaggtcaaccgacaagagttatgctgaaataaggctagggttacagagattggactattttcaatgcttttcttgcaggagtatgcaagcagaaagcttggtgaacagcaactacacatcctgcaatgcttcatttagaaatgaaacaactgtcctttcaagtgaatttgttggagctcttacaactatatgttcatcagatatgttaagtgaatgtgaattcgcaattcgtgtgattgccaaagcatggttgaactcccaagctgaccctctaattgaagaagcactgtcacagactagtgtggttggggctatccttgaggtattgtttgcctcaagtgaagatgacattctagaattggctatatcagttttagcagaattagtaggaaggaatgatgcaattagagaaattatgctgaacttggatccacaactagaaatctttgtgagacttctaagaaggactggcctatttctaaaagctgcagttctgctttatctgttaaagccacaagcaaaacagatgttatcaccagaatgggtgccactagtacttcgagtgttagaatttggagacaaagtgctgaccctcttcacagtacaatgcaatcctcaagtggctgcaatttactttctggaccaacttcttactggtttcgatgaagataggaatttagagaatgctaggcaggttgtttcacttggtggattgacccttcttatgaaaagaattgaagaaggagaaattcatgagagaaacaatgctgcttttatcatttatagttgcattcatgctgaagaaagctgccggagttttctagctgacaatataaagaagagttctttactagaactcattgttcttggcaatagtaaaaattgcagtggatgtgccttttctatgctagctgagttactataccttgataggtatgtacttcattacctaacgtttcctagatatcttgtttattctttattcttttccttcttttcttttgtttcctcacttttatcagaaagtgttgatatgatagtcttctgaaatcatgtcagaactaccaagattttaaatttcttgaggggacttaaagatggatggggtggcctaaacacaatgcacattctgttcatctaccttcagagggctccacctgaagaacgccctttggttgcagtggtattattgctgcttgatattatggtaattccttccacttactaatccatgtatggaatattaacttattgtctggtgaataattttccaagttattttataactaattgcttccaaaatcaaacacttactctaattaacgatacattagctatataataaatcgattttagtaatcttgaagagttcatgaatggaatagcagttgtgttgcaggaagatcctttcatggagagcttatatagagcagaagcaattgaggcaattgtggctgctttaaattgtcaagtgtgtaatgacaaaatacaagaacaatcagcaagagctttactcttgttagcaggacacttttcttatacaggagaatcattaatggaaagaactcttctacaacaagctggctttcaagaaaattgctttgaagattcctcttatggcaaggaaattgttgtttataagtcagctcacaaagtaatctttgccttggattataattatgcaattgtcaaatttcatgtccctagatctcacaacaggaatttctttcagtactacttgctatagaaattattgattagttgtgtgttgatgaccagaatgaagaggatgatgaagctgaaagttggcgaagaacagcagccagtgtcttgttcaaaagtggacataagaatttactaagtgtactttcagattctgcagcaaatggagttccaagtttagcaagagctagccttgtaacaatttcatggatgagcagctaccttcacttagttgatgatagaaagcttccaccaatggcattatcaatcctcatgccatttttgctaaaatacttgaattatgacaaggatgttgaggcaagagtgctggcttcatattcattgctatgccttgtaaaaatttcaggtatgaactttgaaacttttgccattttcagaattatgccaaacttgtcctataagaataagttgttttagttattttctcaaacttttagatttggcatcataagaaaaaggggggcttcagaatatactattataaatttattaaattttaattagaattttgtatccttgtttaactctagcttcatttttcatttgtcctttcttttggcaaactcttagcaggatgtgtttctttcctaccatcactagataaagactcactcaaacatctccagaatctctctctaatgacgtggacttccaatgagctaatttcaatcatctccaaaagcagcttgcaataaaaaccaatgaaaagcaaagctccattgtttgaagtcttcagtgtgtgttcattatttctctttcatgtacatgtgattgtaatccgtaatcacccttgagtttgtatagttgattagtttgaaactttgaatggaattgtttccaacaaaatctaccaaaatatatttgtttcattttatgatagcttaggatttcacaagctgaaaactttgttcagcaaaagaaagaaaactataaaaacgggggaaaaaaacttaaaaagagtcttaggtgctatatagtatccaatacaagtagttgtgcattgatctcgctattatctttttgttcctagattacaaaatttgtccttatgtcagtgtctcaccccttaaaagaaaaaggaatgaggacaaaatagatgatgaaaaagagggacacttttgctaagtgttttacaaggctaacaaatttatctcttgcttggttctgcatgtgcatctctatagactctgactgagtaaagaaccctcatctctataaggaaaaagaatctttttaaggaaaaagatcttgtccgcctagaataacagacaaacaggacagaacaatttgggacatagttggatgtgtaattgtgtggaattgtggatgtgatgtgatcgctcagtgcgggaacttcactgtggggtgaacagtttttctaagcttatagtaacttaaatattaaatccatgcaatacacgcataagcaagtacatattgaacttggattagtatttagtagtcaacctgatcaaaggattgagtttttattttttaaatttttcgtaatcaatcttgttcagttaagactcctcacccctctctaaagatgtattttgtgggatcaatccggactctttccacaaacttagcctaactgtcaaatgagtctcacccattaagtaaagggattgaattattgattttttaatgtaaaattttagattaggggaagatacactcccttacaagaccagtaaaaaatgcaaaccctcaacagagacttagtaaaatttacatatccttttaccaataagagaaatttgataatcaaacttaagttataattagtgtggactatggagattctattagttttattgatgactaatttctattgaaaaatttgactaatcatctttggtagagtctttcctcttaaccactttatttttcattcacaagacttcaatcaaaactttacttaaaggattgagtttaataccacttggaccaacgacttatcaagtggatagatattgattatttgattcttatgtgatattataaatttaattaaatttaaaatctgttacatgcacaaagagaaacgtcagtcattgagtaaaaaaaaatcagttttaagaataaataaatccgtgccaaaccaaaacataatactactactacttcccatcctttttataaggaatatataataatagagttaaaaacattaatattatcagtttcttataaagacagaaggaatatacagtaagaaaccatattcagaagaaactgaaatatgtagagcttaaagtccaaacaaaaacccatccatcgctgaaacaaggtcaataagtcccacgtcactatgcattgatgttttggctctctccatatggcctttggtaccattgataaatcctggcatcaaatgtaatggtaagttcccatatatatataaagacaaagcaagttttcttcaatcagtttttatatagcttactgatattgactgtttttcacccattaagtgaatgtcccatctattagatcaacaaaaatcattctagtgtcaactttatttgttcaacataatattggtgtgaattatagaatatttatcaattttattgatgattaatttttgttaaaaaattcaactaagtatttttagtagaattttttctcttaattacatttttttcgtccataaaatttttgaaaagttgtttaaaaaattgtgttcagcaccattcgtgttgatttagtgtcaagttattatgatgccatgtgtgattttaagaatgcaaacgaatttgtacggtggtaactatatagtatatacacatttaactaattaacaatcattctttcattacgaattacaatgccctcatcgggaagataaaaatttcacatgactagggagattcaccaatctacatgagaattgtccttgaaacttgatagccaattctaatatagccaagtctagtcttgctacaattattccttctcatctttaagcttcacccaattgggttccattgaatttttacagcaaatgacagacttttggttggccaaaactccatgttgtgtagccatgtgctggccacaagcgtatcttccattgtccttatgtgaattagaggaaccccatcctcaagaaaaaaagtaaaaaacagaagcatagatagcagataagagagtaagacaacagtctaaactcaaattttgcatgaaatgcatgaccaatcattatcatttatcaatatgcatggtccccattattcttcgttcacatgctactctctcagtacttggtctccaataatgtctcatatgtgtgcaatgtaagaagaataacgtatatacacgcaagcctagcctttataccaaacacgttcaaattaaactctctttgcaccagaaagtagacggtacgagaattgaggcatggaattgaaccacactagtgacacaatatttcaaatggttaagggaatagtggaaaaccttaaatatgagattccattagaatccgcataatccaaatagttgatacaagattgtactaagaggcctaatagagaaatgctttcgaggataaatgcaaaatgactcctaaatcctaattgattccctcactttttgtgaacttgcatgcattttggattcttttcttctttaacaaaaagaagagagaagaaaggaaaaatatgtcttaaaagatttcactagctagcgtacaatatttaccaaagacacacccttttttcatggtgtgttcatttatttaaaaaatatacttatttaatatttgatttaaaaaattagggatttgaaagaaaaaactttattaaaaattgaactttttgaaaagaagaaaaaaactgaactatactgatttataaaaacgatttggttaactacacctttttataaaagcgatttagttcaattcagctctttaaaaaaatcaaaccatatttaagttttgaatgaataactaaactgaatcgaaccagactaaaccttaaaaaaaattaaacattttttaagaaaaaactgaaatcatttttataaagtgattcagtttattttggttccagtttttctagttaccactttttccccttctcttccagactttctttccttctccttcaattgttatactaacggagccaacatttttaattaatattttaaaatttgttacaaatcataaaattttaagtaaaactcattaaataaaagtaaaataataaaaaattataatatttttcagtcgtgttactaatatttcaatatttctcttgtttctattaaggaggcaattgttatttacacctcccaaacttactaatatatcttacttttatattcttttatatagaaatatccatttttttcaaaaattactttttaaaatattaaaatcttaacacattctgaaaagtactattcgaaagtgttatttcagagagtacttgtccgaagccaattttaagaagaaaaaaaaggacaccgaattggttttaagggaacctttgcatagtttgggatagttcatcatggtgacataatagtcacagagagcttaagctcttggatgtgtttcttattttcgtgaaaattttacttcttaaccggaggagcaatttcatgaataaacaagacatggtttcaataattacattacttgaaagatttgtcgtcactatgattggagggtcgatgcatccatgaaattaatattcctactaatgcttccaaaatctaataatttcttttagaaaaacgagcaagtgggtatatcaacacaaagcaacttcaaggcaattggtgcccatttttttctttctgaaaattacctctcaaaaaatactttctagaatattaaaattttaacacttttgaaaaataatttttggaatgtaaaaatttcaacattttcacttctggaaattactctttggaatgtttaaaaatttaaacttccaaaaagtattttctagaaaaatgatatatttgaaagaaaaaaaaaagcatattaataaagttgagaactgccaataacaattacctattaaggaatattaagaacggtttttctaacatctcatctcggagtatttttatttattaacatttggggatattttaaataaattattaaaaagggataaatagtaacatgtgttatgacttctaagttaaaagtcgtaactcttttcatgacttatatttttttattttttgttaactgattcaattttttttaagttgcaatcatttttttaattgaagtcgtaaaaagtatattttttatgattttagttaaattttttcaaatttttttaaaaaacaaannnnnnnnnnaggagcatctaatggtcgtctcataacatgcccaaaccatctcaatctatgctctctcatctcaatctattactttaaagtcgtatacttaaaaatattaaattaaagtcgtaaaatcttttacgacttcttaaaaaaattaaaaaatataaatcgtgctagaaattattacttctaccttagaagttataacaccttacccatttttaataatttatttgaaatctaatccaaatgataataaataaaaaaaataagccgagatgataaaaatggaataattacatgttccataatctcatgggagatgttattctcatccacattttgctattctcacctcccacatgctttaaatttttcttctcaaacgacactcgatttttaactccatcaccatcattgccatctggtggctcttttctggaaccgtcaacgcctatcggactcatcaagaaaacaaagccctcagaatccattacaatattctatagaataaaaacttgcttgaatatgagaatgcaacttctgtgaaaaaattacaactttttaataatacataaaaaatattctcactttattatgcttggaannnnnnnnnnatattttcttaatttttggtatatctaatttttaatatattattttatttaatatattttttatattttctacatttatttattaaataattaaactaaaaaattatttacaatttttttaaaaaattaaaaaattatcaatttttttaaaaaaatctaatgacttcaaaatcgtaaaaatctttacaactttgaagtcgtaaataattttatgactttgaaatcatatataattttataacttgaaagtcatattttaaatttttaaaaaataagttgaaaaaatttaactgaaatcataaaaaatattactacttcagttaaaaaaatttaaaaaattattatgactttaaaatcgtatacttaaaataagttaaattgaagtcgtaaaatcttttacgacttcagttaaaagagaatttaaaaatataagttgtgctaggagttattacttttaactgagaagttataacatcttactcctttttaataatttatttaaaatctaacccaaatgatagtaaataaaaaaatagccccagatgataaaaatggaacaattacatgtcccataatctcacgagagttgttattctcatccacattttgctattctcacctcccacatgctttaaatttttccccttaaacgacacttgatttttaactccatcaccaccattgccatctggtggccctttgttggaaccgtcaatacctatcagactcaccaagaaaatagggttggcaaaacggctctagcccgccgggccagcccgcaaaaaaatgtgggttggattgataatatcagcccgctaatcaaaagcgggacgggccaacccagcccgcaaaattacaggtcaaatgcgggccagctcgttgggccaatattatttaaatattaaaattaaatagatatatttaacatattttgaaataagtatatgcttttaatttatgctcgtttgcactctcaatgtattctaattaacttctaagttttaatattaaaatgtttatataatgatactttcaaatagtctttcattgctagcatattacactttggacagtttacatccataaattctatttgcaaatggtgtaattttgtgaattatcacatgacatcatttatttagcattaattttaaattatttacttttatttaactttatttttttttaaaattatcatatttgtatttttttataatattttgtattttttttaaattaacttatttatttatttttatttttatacaggctgacccgcgttaaagcaggatgggcaacatttccagcccactttgcaaaagtggaccagcccgtcccgccctgcatttttggtaggctggaccaacccgccccttttttgcagactcaccgactttcccaaccatataacaaacaaagccctcataatcggttacaatattctatagaataaaaacttgctttcatattcaacttttgtgaaaaaattacaactttttaataatacataaaaaaatattctcactttattatgtttggaaataaataaataaataatttaaagcgaacaatactactgnnnnnnnnnnnnnnnnnnnnnnnnnnnnnnnnnnnnnnnnnnnnnnnnnnnnnnnnnnnnnnnnnnnnnnnnnnnnnnnnnnnnnnnnnnnnnnnnnnnnnnnnnnnnnnnnnnnnnnnnnnnnnnnnnnnnnnnnnnnnnnnaaaaaaaaaaaaaaaactgtcacaagcagttgaaattccgttgcatttaagttgtgtgcaattgtaatctgacgcctttaatttttgcattttaatattttaaatatgtatttacactctttcataaaattaaataagcaaataatcatttcaacttccatgattttgtactgttagacctccacgaaaagatcttgacaatttccattgcaccccttcgagaaattttttccaccaacagatcatttccattgcaccccttagattaatctctttccaaattagctgtatttacataatgaatttgtttaaacttatttctatttgtgtttatctaactatttcagtttttttaaaagttattttttcttattttgataaacaattcctatctatttttttaaaaaatgctttcctaataagagcttaaaattgtttttttattatagaaataattatattttttattttaaaataaaataatatatacttatttctataataaaaactataaaacaaaaatgatatatttgttttaaaagaaaaaataatatcattatcttaataaagatataaaaggaaaataaaatattttatcaacaaataaataaagagataaataatacttaattattattattttaataaccaaacttttaaaataaaaataattaatcaaataataaaatattaaatataaaaaatagaattagaaataatagcagcaagaaccatcatatcttatgtaaacgcaatagttttttttagcaaatattaattgttagtttgttaatttttttaannnnnnnnnntaagttgcaattatttttttgtttttttaaattgaaatcgtaaaaagtatattttttatgattttagttaaattttttcaaattctttttaaaaaaacaaattaaaaacacgacttcaaagtcgtaaatattttgatgactttgaagtattcatgtttttattttttatttttaaaattgataaagttattttttaaattttatttttaaattataaataaatttttaatttaattatttaataaataaatatagaaaatatagaaaaaatattaaataaaataatatattaaaaattaaatatagcaaaataagtttttaatatattattttatttaatatattttttatattttctaaatttatttattaaataattaaacaaaaaattatttacaattttttaaaaaattaaaaaattagcaattttttttaaaaaaaatctgatgacttcaaaatcgtaaaaatctttacaactttcaagtcgtaaataattttataactttgaaatcacatataattttacaacttgaaagtcatattttaaatttttaaaaaataagttgaaaaaatttaactaaaattactacttcagttaaaaaaaaatttaaaaaaattattactttaaagtcgtatcaacatcaacatcaacatcaacagcacctttaacccaaattaattggggtcggtggtagatgaacccaataataaatcgaaaataaagcaaaagagagaaacagagttaaatataaaagaatggtgagaggagaagagaaaagaggaagaaaagaattaaaacaggaaacaactggaacatagaactactaaagggtttaaccctccatcagacttatagcttttctccactccgtcctaagacataccgtccgccaatctaaatcccactccattaggtcttgtttaactacctttccccaggtaagttttggtcgacctctacctctctttgtatctagctcttggtaacatactcttgttctaacaggagcatctaatggtcgtctcataacatgcccaaaccatctcaatctatgctctctcatctcaatctattactttaaagtcgtatacttaaaaatattaaattaaagtcgtaaaatcttttacgacttcttaaaaaaattaaaaaatataaatcgtgctagaaattattacttctaccttagaagttataacaccttacccatttttaataatttatttgaaatctaatccaaatgataataaataaaaaaaataagccgagatgataaaaatggaataattacatgttccataatctcatgggagatgttattctcatccacattttgctattctcacctcccacatgctttaaatttttcttctcaaacgacactcgatttttaactccatcaccatcattgccatctggtggctcttttctggaaccgtcaacgcctatcggactcatcaagaaaacaaagccctcagaatccattacaatattctatagaataaaaacttgcttgaatatgagaatgcaacttctgtgaaaaaattacaactttttaataatacataaaaaatattctcactttattatgcttggaaataaataaataatttaaagcgaacaatactactgtcacaagccgggttttattttcatgtaatgggattgcaaacattgtagagattttttttagtttttattttagaaaacatagtagaggattctatgttcaataggaaggtttttcaatattctactattcgttactaagaattcagattcaaacttttatgtaatgctgattgggatggtgccacgtcttgnnnnnnnnnnnnngaaaaaaaaaaaaaaaactgtcacaagcagttgaaattccgttgcatttaagttgtgtgcaattgtaatctgacgcctttaatttttgcattttaatattttaaatatgtatttacactctttcataaaattaaataagcaaataatcatttcaacttccatgattttgtaccgttagacctctacgaaaagatcttgacaatttccattgcaccccttcgagaaattttttccaccaatagatcatttccattgcaccccttagattaatctctttctaaattagctgtatttacagaatgaatttgtttaaacttatttctatttgtgtttatctaactatttcagtttttttttttaaaaaaagttatttttttgcttattttgataaacaaatcctatctattgtttttttaaattctttcctaataagagcttaaaattgtttttattatagaaataattatatttttattttaaaataaaataatatctaattatttctataataaaaactataaaaaaatgatatatttgttttaaaagaaaaaataatatcattatcttaataaagatataaaaggaaaataaaatattttatcaacaaataaataaagagataaataatacttaattattattattttaataacaaaacttttaaaataaaaataattaatcaaataataaaatattaaatataaaaaatagaattaaaaataatatagcggtaagaaccatcatatcttatgtaaacgcaatagtttttttaaacaaatattaattgttaatttattaatttttattaacaagnnnnnnnnnnnnnnnnnnnnnnnnnnnnnnnnnnnnnnnnnnnnnnnnnnttttttttaaccatttaatcaatcttatatcttcgtataaacacaataatgcaattgtgggaaactgtggaaggaaatgtgggatattattaattgattcttttcaaagccttaagttttactatcctatcacttttttgcatcttatttgtttgtataggctggttatgttatttttctgtaacatgtgttgaaattcttggcttgggtaccaataatttgccttacacaaggtaagtttcatgtcatttggaatttgcctaatgcaaaataagtttccatctgcatttttttcccacaagttttttctaatattattttagtttttccttttttcttataattgatttttggctttctttttttgcttgaaattgttctcgaagttcttttcataccacattctctctctatgttggaggatattcagaaatggagaacattgcattcaaagaacgaaactttgtagtgcatttgtatcttaattaactttgcttaactttctgttgtttcaagttatatctaacagaagtttatttccttccaatttagttgtacttctttattataaaggatagtgtaataaattatactatattgcttgaatcatattacactttttcattatttttttctcccttaaatcaaaacaaaaattagtgtgtannnnnnnnnnnnnnnnnnnnnnnnnnnnnnnnnnnnnnnnnnnnnnnnnnnnnnnnnnnnnnnnnnnnnnnnnnnnnnnnnnnnnnnnnnnnnnnnnnnnnnnnnnnnnnnnnnnnnnnnnnnnnnnnnnnnnnnnnnnnnnnnnnnnnnnnnnnnnnnnnnnnnnnnnnnnnnnnnnnnnnnnnnnnnnnnnnnnnnnnnnnnnnnnnnnnnnnnnnnnnnnnnnnnnnnnnnnnnnnnnnnnnnnnnnnnnnnnnnnnnnnnnnnnnnnnnnnnnnnnnnnnnnnnnnnnnnnnnnnnnnnnnnnnnnnnnnnnnnnnnnnnnnnnnnnnnnnnnnnnnnnnnnnnnnnnnnnnnnnnnnnnnnnnnnnnnnnnnnnnnnnnnnnnnnnnnnnnnnnnnnnnnnnnnnnnnnnnnnnnnnnnnnnnnnnnnnnnnnnnnnnnnnnnnnnnnnnnnnnnnnnnnnnnnnnnnnnnnnnnnnnnnnnnnnnnnnnnnnnnnnnnnnnnnnnnnnnnnnnnnnnnnnnnnnnnnnnnnnnnnnnnnnnnnnnnnnnnnnnnnnnnnnnnnnnnnnnnnnnnnnnnnnnnnnnnnnnnnnnnnnnnnnnnnnnnnnnnnnnnnnnnnnnnnnnnnnnnnnnnnnnnnnnnnnnnnnnnnnnnnnnnnnnnnnnnnnnnnnnnnnnnnnnnnnnnnnnnnnnnnnnnnnnnnnnnnnnnnnnnnnnnnnnnnnnnnnnnnnnnnnnnnnnnnnnnnnnnnnnnnnnnnnnnnnnnnnnnnnnnnnnnnnnnnnnnnnnnnnnnnnnnnnnnnnnnnnnnnnnnnnnnnnnnnnnnnnnnnnnnnnnnnnnnnnnnnnnnnnnnnnnnnnttttttattttggcatctgtatatttcttgaaaacaattatgtctaaaatgtttgtttttaagggatgtctaaaatgttagttttaaaaagtaaaaaagtttttaaaaatatataaaaaggtatacaatttccttattttcatcccttaaaagtttaaaactattacttttgtcccataatccgtaaaaactaagaagtaagaagtaaaaagattagtataaataaacatgtataaaaaaacatattaaactaaaattaatatacacattaatacacaataaaaaaaattgttataatatataattttttttcagatcataatattaatacataataatcttttttcaacataatttattctatatttataataaatcacaattcaaattttgaatctcttaattaaataataaatatcattatcaattatcaattatgtcaatcgttattaatataatatatcaatttttacacaatgaaaattatagcataatagaattgcagatgtttgcctgtgtttccaccagttttgatgaatcaaacacaaattcatccttaatcaccaaataagaaatggacaagcattggcacagtagttttacacatgaaatcatgaatatcctttaagtgaaagaaaccactatcgggatttcagtcatagattaggtaatctcataccccatacacatgtcactatcaaattactttgacttgatgatgacaatttggtctatttgcagaccccccctcatttcctccgtcacttcctctcactttcctgtcatttctcacaaccctctctcgtaatgcccggaaacacactctttgtgtctcttgcctctagcttctaccctaagccaacccagggccattcccgtaatttccccaacctcactataaattcaccccgaccgtcgcggtaactactcaaattcggcagttactgtttccgttcatttcgtgttcgtactttttttctcgctcccgttttctccaattcttcgtggcaacaatcccaatggaaagaggtgcttacagaggccctggccgtggccgtaacggtaatggtgaccgtcacagttacggtggtgaccgtgacggtaaaggtgaccataacagttacggtggtggtcgcggtggtcgtaacagttacggtggtggtggccgtaacggtaacggtgacagaggaagatttcgtcaacattcccgatctgatagtggcggtgatagaagttttccttctcaatcacaatggcaaccaaggccaaacccttctttttcttctccaaaacctaacaattctcattctcaagttcaaacacaaactcaagctcatccaggtattcagtttcagccactaatttcacttttcatactgtttttagtctgtataatgcatcatcaatgttaactaacaataaattataatagtttagtttaatttatttttaaattttttaattatgtacagacattggatctttgaagatatcagagaagaaaatggacactattacacctgtgcgtaggcctgacaatgggggaacagtagcagttcgaaaatgcaatctccatgtgaaccatttccctgtttccttcaatccacagagtataattatgcattataatgtggaagtgaaggccaaggctcctccaccgaggaacaatcgccctcccaagaagatttcgaagtacgacttgtcattgattcgggataagctgttttccgacaattcgctaccttcttccgcgtacgatggcgaaaagaacatcttcagcgcggtgcctttgccggaggaaacatttaccgtggacgtgtccaaaggagaggaagaaaggcctgtttcgtatttggtctctctgaaattggtgagtaggctcgagcttcggaagttgagggattacctcagtggaagcgtgctttcgatccctagggatgttttgcacggcttggatttggtggtgaaggagaatcctgcgaagcagtgtgtttcgttggggcggtgcttcttccccatgaaccctcctttgagggagacagatcttaagcatggcataattgcgattggagggtttcagcagagtcttaaatctacttctcagggattgtccttgtgcctggactattcggttttgtcctttcggaagaagctgtcggtgttggattttctgcacgagcatattagggacttcaatttgagggagtttgggcggttcaggagacaagttgagcatgtacttattgggttgaaagttaatgttaaacaccggaagacaaagcagaagtacactattactaggttgacacccaaggttacgagacatatcacattccctattttggaccccgagggccggaatcccccaaaggaagctactctggttggttactttctggagaagtatggtaggaaaattgaatacaaggacattcctgccttggattttggaggcaacaagacgaactttgtacctatggagttgtgtgagttggttgaggggcagagataccccaaagagaatttggacaaatgtgctgccagggacttgaaagacatgtcagtggctcctccaagggagaggcaaagtacaatacaagaaatggtgaactcaaatgaaggaccgtgcgggtaaggggaatttattttcatgaacatgtctggatacttgtagcttttggtggtgtttgttgcattggtataagttttaaatgatctgtgtgtggtcaatttctccttgtctgtttactaatttgtcaactgttatgacttgtgatccataagtaaattttttaccttgctgcgcttatatgttgaaaatgttattatcgaatatgtatggtttgtggtacttgtgatgctgcttttccttgcttgcatggaacctaattagttttattgacacaagtatggactctttctggttctttggtgtttctttttcttcttttttttttttttaccccctctccatcctgctttgtactgtccaatgaggttacttttgcaaagtcatttcattctatttatttgaaagtaaaattaactaaatatcaggaccttgcgcttaaaggagactgcatagctttgaacacaagcacaaatcctcaaatgtcctgtccgtatagcgcattctttctatatttgttgacttgattgtgtttagtataaactgttttggctccacaaatacaaattgatttatatttaacaaatactttctgtaagtacaaaactagaattggaaatgtaatggctattattttgtaacgggggaacgtataacttcaaaatccatgtatctttttaatttcccttttatctccttgtgtatatactttgccatgattcttttcatctgctgtatcttttttttttcttcttaatttgttatagagacaaaggcctcataaaatctcttttgacagaggtggtgttattaaaagttttggaattagtgtcaacacttccatgacaaatgtgacaggacgtgtaattcagcctccaaaattgaagctaggtaatcaaaatggccagactgttagtttgacactgaaagtagataaatgcgagtggaatctattggaacgatcaatggtggaaggcaagccagttgagtgttggggcattcttgattttaccggccaggagtctggttggcgcaaatttaagggcaaacaattcgttgagaaccttatcggtaagtacggaaaattgggtattggcatgaaggagccagtttggtatgaacaatctagtatgtggagtcttggggattacaattcgctgtgtaaattacttgaaaatattgcggataaggttcaaaaaagatatcgacgaaaactacaatttcttctttgtgtgatgtccgacaagcatcaaggttacaagaacctcaaatggattgctgagaccaaggttggcatagtgacacaatgttgcttgtctggtattgctaatgaagggaaggatcaatatcttacaaatcttgccctcaagatcaatgccaaaattggaggaagtaatgtggagctcatcaataggctaccacactttgagggtgaagatcatgttatgttcataggggctgatgtcaatcatccagcttcccgggacatcaacagtccatcaattgctgctgtagttgccactgttaattggcctgctgcaaatcgctatgcagcacgtgtttgtgctcaaggtcatcgggttgagaaaattttgaattttgggagaatttgctatgagctcgtttcatattacaataggctgaacaaagtcaggcctgaaaaaattgtcgtctttcgtgatggcgtgagcgaaagtcaattccatatggttctcacagaggagttacaagatttgaaatcggtgtttagtgatgcaaattacttcccaaccatcactattattgtcgcacaaaagcgacatcaaactcgattttttcctgtggatccgaaggatgggaatcttaaaactggcaatgtgtttcctggtacagttgtggacacaaaagtagtacatccttttgaatttgacttttacctttgtagtcactatggaagcttgggtacaagcaagcccactcactatcatgtcttatgggatgagcacaaatttacctctgatgatttgcagaaactgatatatgacatgtgctttacctttgcaaggtgcactaaacctgtatctttagtccctccagtgtactatgctgatctcactgcatatagaggacggttatactatgaagcaatgaatcaaatgcaatctcctggttcagctgcgtcgtcttcatcatcgcagatcacttctttgtcaatttcttcaacaggctcaagtttaaatgatccggggtattacaagttgcatgctgatgtggaaaacataatgttcttcgtttgaagggcttatatcttcactttctgttgtggcagaagaacttatgttgctcctcttctctgctctcattgcattgggacaaataagtagtttgtttgtgaatctaattagtcaattatcgtgaaattgttttcagtgtcttgtcctttgttattgtcataatggagtcgaatcttgttcatgttgttttagttggttttgggttttgtggttgcatctacatgcaactttgtagcaggtttcatgtactttgctatagttgcaattgagtcccatattgttcatgttatttattttagttgattttatgagagcgagttttggcacaacagtaaagttgtgtcttgatgacttgttggttatgggttcgaatctaaaaacagtctctttgtatatataagggtaagactgcgtataatatttatttctttatcttcatataataaggagtctctggataatggggtacctaattttatttattttagtgtgttttgggtttatacatgcctcataagttgcttcttatttttttggtctaccatgtctcaatttttcctggctttttttttgggggggnnnnnnnnnnnnnnnnnnnnnnnnnnnnnnnnnnnnnnnnnnnnnnnnnnnnnnnnnnnnnnnnnnnnnnnnnnnnnnnnnnnnnnnnnnnnnnnnnnnnnnnnnnnnnnnnnnnnnnnnnnnnnnnnnnnnnnnnnnnnnnnnnnnnnnnnnnnnnnnnnnnnnnnnnnnnnnnnnnnnnnnnnnnnnnnnnnnnnnnnnnnnnnnnnnnnnnnnnnnnnnnnnnnnnnnnnnnnnnnnnnnnnnnnnnnnnnnnnnnnnnnnnnnnnnnnnnnnaaattatagattttttcttttactttatttgagtcatttattaatttctatttgtacaattgtgatttatttgtagttgggaatatgtaattttgtctggatatcgatttcagaaattttggggtcaatttaactttgactcaatttattaagattattctagtgtgaccggaaactttattctcttgtattttatgaaatgaattcatgatggttttttacatcacttctcatttttttttctttctaactctattcttattttaagtgcttatctcaattggagattcaaatgtaacatcatagttgtctttcttttctaataattgaaaaaaaatacatcaagaagttaaaaaaaataaagaataaaagacttacaagatttacaagactattgttggaatgtcttgaacttttgtatatgtgtatatatatatatatatatatatatatatatatatatatatatatataacacgaaattttgctgctcacaaagggtacaattagtgacagccgacacatatatctagaaagtatgtagacaataaaataaatcatattcttaattaaataacattgatcaatggatttccactctgcattaattagtctcaaaccatatgctctttggaacattagatgcctcaacttgaacatgtggagagtgcctattcaaaattatgaggcaaacatttttaaacacatactaatgtcagatatctcaatgactaaaacttcattttgatatgccattaattactttgtatcatctgcaagaacttaaagtaaaaagatcaactaattaggtgagcggtaccagcaacaaagtgggaagattatgaatagataaatatagaaactggtagaactagaaggtggtagtttttgaattagcatgtagttggtgtgtgggaaggaaggtttctttttggttctgtacttatatcgaatcttttgtagtcaatggattatggatgtgaaattgaacatatatgttgtatagacagctagattcacttaatatagttatcacaaataggaaaaacataatagtaaaacatttttatatttacgttttgtcttggattagagcagcatttttatagttacctatagttgctttatgtatttgttatttatagtcgtgagtgggagcatatatataagttataagttcaggttatacaaacatattgttaagtttggttttcttggtatattggtgaggttgtgttaatttatggatgttattttgaaattgcttccttttattgcgctcttgatgctatatatgttttggattgactttaatacttcatttgtttttatgtaaaagatccaagtacctaatttaatttatggagtaacattttttggctaataaataaactaatgtgttgttgtttatggtctttggtgaggaattgaaattgaaaattgttatgccctgctacttaatttcctagagttaagtttctaagataagattcaacatttttaatatcgaaatataaagtatttttattctctaactttgaagggagtagcaaacatttttattacagacattgcatacttgcaacttgaaagcagtgagtgaggatctattgatgtagagtaatataattatataattgtcttttaaaatagaataaattatactcgcattttatgtgttttgctcaaatattatttgatacccttctcttttttcacattacttttattcctttttattaacgtcgttaactaatgtcaattaaattatgtgaacagacgaaattgtccttatattttaattgtaaatccaaattatcccctcccaattagtttcaaaatatagagttcactttccattcctctacctcatttagagtattgttcatcttccactggatgcgagtttctcttcctctcatgacgttcacatttcattcctcttcatcattcgcgagtttttcactgttcttcattgttcctcttctagttcacaagttcttcattgtttctcttccagttcgcgagttatccattgttcctttatttctctttctgttccatgatttctgttcacactaaggttcttcttataagtgactattggacattgtatatagattactttttaagaatatttatttaattttaattatttattattgtctatttctgaatagggtttcagtttgggaccacttatgatatttaaagtcatttatttattattgttgattaaaatagtattgatatttgggatcatatgaaacacaatggatgaactgaaaattatttatttattattgttaattaaaatagtgttgatgtttaggataacaggaacacaatggatgaaatggaatatattggtcctaaatcaggcaacgtgaatattttggtctactttacggaccaacgggacaaaccaagtgaaatatgcaatattgatcctgataaatttgaaatatttgaaattaaaatcaatgtgtcaaagcaatttaattatgtttgctggtttaaattgttgtgtctatgttacatcatcaaggaaaatgaaatatataatttcccatatgaaattggatgaattactcaatctttttagtttaacattacgatgtgtcttgcaactcttgattgagacattatataataacctatgttttttataaaaaggagaaaaagaaataggaatttaaatttataaaattctgtcacaaaagctgtcgcaaaagccttagtgacagaattagcgacggaatagcgacggattttcgcgacggagtctggcgccaagagcgccacaggtgctggaagttggcgccaagagcgccagagtggcgccaagagcgccacagatgctggaaactggcgctgggagcgccaaagtggcgccaggggcgccagatgcactgaaaggtggcgccaagggcgccagaggtactggaaagtggcgccaagagcgtcaggatggcgccaagggcgccagatacactggaaagtggcgccaagagcgccaaagtggcgccaagagcgcggcaatgtcggtgaggaccagtataaaaggccatctcgcgttttgggaaggaaaaacactattcatcttcttcctctggcccaggcagccattgatggactggggaagctccataacttcatcctaactcatctaaacacctcctaatcaccataaaacaagattggaaccttatgtgagctaagttccagcctaaagagtgagagaaaacccatttcctgagaaaccccagaaagctgagttcagagaggaaaaggaggcaacccaaggacgttgggacttgaagagacaatcacgaggccttccttgacagttttgaggtaagaactcaagctttcaccggttaatttgtgaattgggtaatggggtgaatagtaacccatctgtgatagggctggaattaggcttaggttctttagaaaagtgtgatcaggaggttgttctgaggaatatgagatattgaaactggatttctgataaagttgggttgtgactttgaaattggtattagtaaagaaaaagaatgaatgggtagaaggtcctgtgataggaatgaatctttgtgttctgaaagaattgtgcttgaggccaaataaacggtaaatatgttgtgataggtttgatttggccatatttgataactggtgaattatgaactaacagaccatggattggttaatgaagagtctcaccaagactctgagaccatggtcaggctgagaatgatcccattaaggatctgggaggaggcctatgcagtgattaggccaccaaccctaggataagcaattgagggattgaggaaaggaatcagacttccttttatttcaacggttgagtaccgtcgttagacacttggtatagtggttctaatgtgactgtgctgtataaattgaatagggcaaggcatgatgatagcagcggcatggaccagccaaatgaagatagaggataaagcatggtcacaccaggtaagttcagtattcttggagtgattttcctacttgggggtcactacttaattgattatatggaatgtgaacaccaggttagtgccccatccttgatattaatatggatatgatagctaatgtagttaaaccctaggatagaggactgagctgtcttgggtataagagatataccctgatgtttaatgataagatgaacactgtgttagtgttccatggttttgatgagacgcagatcagagaatgatctgtgatggaacctatagggtatcggattggtatcgggctagatgaggttccctagccagaggaggagtttgaggactccctggaatagctgagattccatgggaggtgccactgctctccactaaagtcctagggatggttgactctatagggatgtccctccttaggcggtgatgatggaagacctgagagagtatactcaggcgattgtgatgagttgataaagaccatgaatgtggtctgtgtttcatgttagattgacactaggaaagtgtcgtgctttgtgttgattatgagtcttgttatggtgtgatttgagtctgtgataggtgtgcattctttggccagagaatagtggactatggaccccttggagatgtacccgcttggcggacaatccttcttgggataatccataggcgtccatgtaaatcctgagtagaggtacctgcgcggcagatgatcctattcaggtattgggcggcgagtcctgggtagaggtacccgctcggtggatgatcctattcaggtactcagttggaagtcctgagtagatgtacccactcggtggatgatcctattcaggcacagatagagccaatcctgagtagatgtacctgcaaggcagatgatcctattcaggtattggatgatgagtcctgagtagatgtacctgcattggcagatgatcctattcaggttctcagtgtggaagtcctgagttgagagattcctcaggcaacatgtgttgaatgtctctatgtgtcttaggctgctatgtgcatgcagttgtttatgtgagccatgaagactgattataggatgaaagcctcagatatgagatagagaatagtgggttctaggggatttatgattgtcaaatgattatccccaggctttggattagattacagaaaacctaatttcagagtaggttttattttagtagttatgagatgaggactaagatctgagagcttgagtgagtctattgctagacatctgatgtctcagtgcagaggttgagtatagtatacagacctcgtttggcttgcatattatacagtatgatagagagatgataagaggaataagaggatagataagataaattatgatattaggtgtttgatagtgaaccagggggaggaaagacctccaggaaccctggacttactgagatttttatctcacccctcgtgggacttatgttgcaggtgcatagggcagagaagataaattcatcagagtgaagccagaagggtcaagctctataggctgtttggattagaagcagagagctttaaggtagtttcctatctcctgtcatatctatatagatatgtctgttatctgcctgtatttgattgtttgttttgattttgattatctggatcaatcagggctagatgtagagatgtttgagttgtatttgtgttgatgttactgtaccatacataatgtatcaagaaatgcgattcttgtatgcttccgcagcgtattttatgctttctgatattataatcatgttaacacactgggtgcacacggggtgttacacattatattaaacattgtgccttaaaaaaaatatttcaaaaaaaggagttaaaacacaaatgcagaagtaaaacactaaatttgaagcaaaggagcatattcaatcagagaaaaaattgaactaaaaaattgaagaagaagaaaaagaagaagaaggaagggtgttaacactatgcaccaagtaggggagttcacgtctaataaaaagttgagttcatatccaattagagagaaaaaaacaaaaagaaataagagtcttaaaatatttcaggttgagaggaagaagatgaggatattttaaacataaaatttcattaaaagtcatatgatcattatgtgcctactttctgttaaattattaaactttgtataggactggagggggtctaagtgtaatgtaagctaaataattaaagagttttttttaggatgcaaaaaggaagaggtatcaggtgaaatttaagcaaaacatagatgacgggagtataatttactctttaaaatattataaaaaataagtaaaattacgttttataataaataattactaataaaaatatacaataaaatcctgtgcagcgcatgggtcatgtctagtttaagacaaaagggagtaactaatatgcaactattttcatatttttacttcaaagtaaaagtgagaaaaacaatttatttttcactaccttttttctttgtttttatggggattttttttctttcctttagcagatcaaattgcatatgcttgacaaaggccttaactcattaacgattcaacctaattctagacaaactcagcgtggctcttacaccctcttgtttaaggggaataatagaaggatactaagatatttcacttacccaaggcttaggaatttaatgcttttattatataaagttttctagttatgtagtatgttatataacttgtcattattaattccaattatgtaccaaatggctcaaatcaaaatctgatatgattgtactgctacttggcattattttaggaagtcatttgatgtatctttaaacaatgtactcgatcacactagtaaaggaatccaattattcatcattcctgataaattactccaaacctgctgtattttttgaagtcccagcaattggatcctaaaaagatactatatctgagtttcagtctgtggttgtagaaagaaaagtgaaaatgttggagcttttagctttacttgaagcagtgggcagtaatgccattcataagtgcaggcttgagatctaatgaggtcaatttccaggaataatgatgaagaaaaaattgtatgagaaccatacagaaaagaaagaaaatagtattcaagaaaaagaagacaattgcatatttttatctctttagttttaaagatttaaatatgctggatactttgctccagcacacttgttacctacaattcattctagtttttctttccatggaatgtactttcttgtagtccttaacaaggttgtcagaatcgtgattttacgtagaatcatggaggccttgtataatcgaatcatagaatcgtaagagtttatttcagacaaaaaaaaaagagtaaattacctatatataaatatgaaacaatgacataactaattttgtcaaattaaatgagtacaattataaataatggatactaaaaaattcaaaataacaattgaagtattaaagttgataacacaagtaaagtgtattaatagagtgtaaatagaaatcacttaaattaaaataaaagtccagtttttaatataaaaaaatgagtcaaaagatgcatagtaagcaaaaagaggtgtaggaagcaaatctgttatggatacgccccaaatacgaaaaaattgctgttcaaaaagacgtcgttcctaaacccaacaaactcgcgaaaacgtagtagaattgcgattctactccaaaaaagaatctacatccgagttaactcgtagagaggtagtagacttgtaaaatcggaagattctacgatttaaattgagagtttgataaccatggtccttaattctgttgtgtctcaatttcaggtgtgataatgagttttatactttctaattctgtagtggtgaggaatacggggatggtcaacagacatgtcattgtgcattttagtgtaaagacaactccgaagacttaatcttaaaatcaatttcaaccaaaaacaattttataaattaagatcttaaaaaaaaaaaaaagtttgaacacattcacccaattatacactaaacctttttggctcatgaggcagggagcttgaaacctcgtcggagtaaaaccgatgaatacacaatcatgatcccattccaaaagtttgaagaggaattatgttgcaaaatccaaattgtggctattgtcgtacatttatttacaactgttctagatatgttaaatcaacttgaacttcctggatatttttactattattatgatgaccatactttatttcaaatctacacccacgaatcagtcatttgagtttgaaatttaaatcatatctttgaggcaaaaaagaaaatgactcttacatatatcaccttgttgaagtaacaaaactagtaatgaaaagcatctataacccagtcaaaaggcaaaacaattcaagctcatacgaaggggtagttttaaatttttctgcttctctgtattcatgtttctcacctttaactaggaagtggttaataagacaacagaaataaaaaataaaaagcatattattacttttataatcaagaaactatcatggtttgggacttaattataccaatataatttccaatcagtaattcatgtttgccaaaaaatcatacagttttccttggtaaaattgtaggtaactgtagtagttattatgattccaccccatctcatcagagagatcaccacaacacatactactggaaattatttatactaagcattaatttaaaaaaaaaagggtaatacaaggttaagcttaggacaagttacattacttaaaaccatgcttaccatactcttctactctgtggagagcatcaatgagaacatcagttgtccaatcctttacataatcctgtacacagcatacgaggaaactttagcctttaaatctaaatgcttccaggttcctaactccaatgtaaattgtttattggttcttaacgtaaagcaacttgagaataccattaaagtaaacgagttcttatagaaattgcttatatactgtgtacactacaacaaccacagattcttaagcattacaagaacaattttttatgtcaaaatgtaactcactaaaatatgttaagaacgcaagttgagttctacaattggagtgaaaattagtaagtgttcttaaatcaaatatatacaagacaaatttaataaaacttaagagaagttaattttagtcatagttttattatggttgtttatagactaaaatatgtttttagtacatgtacttacaaaaaaaattgttataagtcccgttactttaacttcaatcaatttggtctctaaactttagaaaaacatagttttcgttgctgatcacatacggcaattttcattgtgaagactgaagaggaacaaaaatcattactttttgtaaagttgaaggaccaaattgaccaaaagactaaaaccaagtttcacagaaagtacaaagactgaaaacatattttttatccttgtctattcaagattagttcctatagtgaaatcatgttctcatctaatacaatccctacatacatatgaagaaaataaagcatacagtgaggtgcgcatgttattaccggacgcaacggttcatcggttcttattctagaattagggtgggcaagcgtggactcaaacgaagtcctgggcctgacttatcgatactcctctcttgtgagaatctgacagtgccttgccctttaggggcattctttatcttccgctccagcagttcttgggaccttgaatcatcgtattcacattccattattgtcaaaacatctttactgaaagaactcattttgtattttcggatcacgtttcgtggtcattttgtatttttggatcaccttttatggatttcatgatatcatataaaatgcaataacttttggcatttttgctttagtcataaaattcaatttggatttttttattttacttacacatagaaaaatttaaaatctctattttctttcaaatgacattaaaaaataatatttttgacaaaaagtgaagtttttgaaagttcttctcttctcttctcttgaaacccaacctccatcatcgagaatacttaaataataataataatagatttggtacaaaaattattcttgagcttaaaaatccaattcaaaaactatattgttaaatatgctcttagcaccctccctagtagaatgtgaaaaaaatggggtcaaaatgaaccagattgtaaccaacccgacccaattttgtgtccaaactgggttgcatgacccgccctgtttctccataggcctgacccgttgtcgtcgactgaatctcctctcctctcagctttcgcactcgcagtctcaactctcgactcaatctctcgcagactcgcattttgcaaactcacgctctcttggcttcatttgcatttggctttgtttgcggattcactgtctcaggtaatgttcaaagatcctttttcatttattttttttgtgattttgagttttctattgtttgaagacccttttgatttttgcttaatttctctattcactgtgcttgaacttacgtcttagaaggtgtgtgtgtgtgtgtgtggttgcaaagtttgacagaaaaagtgaaaggaacaaatctactcgactggggaatgtttatgttcagatctttatactacagtatacatgttctatcacaatacaattaatctgtttcatgaccatattagaggtcttgctgaatattttctctatttttgaacttgtgggtgttgtagtgatgcattggtggaggaggaggttggtggaaactccgtagctgatatattcaagcaacatggtgagactttctttcgtaataagcaggtcagttggaaagcactatgattttagttgttatactcttcagtgttcagagagtgtgtttagttgtgttgaaattttagattttcctgtttgtttaatctcatccagcaaccagcatccaccatcctcatcgtcatctatcttcatattatcttaaattataagcagcagtgagtggtgctagattgttttaattggagtggccacacagaaaaaataggcttacatatttttttgattcttgaaaatataacttttcattttggtccctttatttgtttttaactcttacatttagcaatgtgtttttggtcctttattggagattaaaagtacataatgttaaaccattgaggtcagatttggtggaaggggctagtcattctcaaagtaacaattcaagtaattattatcagtgtctttgatggccagacatgtctgtaattgttgcatggcacttccttgattttatagactaggtaaaagtcactgattcacctgtcataagcatactacgactcagttgactctggtagataacttttattgtggatatattagtaaaatattatgaggtatgattagcatccacatacaattgttaatatatatatatatatatatattttaattattttccttaatgtagaattgtctgaaaaatgagatgtctactctattgctttggaattgtgacattagaaacatctgccaatgccatctagtcaaaacaaaatggataatgatgctcaagattattttcccatagtatgaattgaaccagaatcttgtgataataatcagtgaatgcacattgtgtgatgctattacttctagatgtttatggtaaatctagttggacatttagattgcgcaagataactaaggggagtaaaataagtgtaacaagactatacaagtatactataaactaatataacagaaggtaattaatgagaaagagtggagcttaggaaagtgtattcattttgcagatacacgtttgtgctccataaatgaagacttgtgatattagaatagcatgaaggccaatatgatgatgatctttgaacttttctctgatatcagcttgaaaatttagtgggtaatatataaatgtgtatactatagattcaataaagaattctgaaaaatctgttaaaggaatgctgatttgatgaatcttaactcttctgcatttctttatcttatgaaaatcttctgcagaacagtgaagccatgattttgattgatgatatgaatcaatatggggttcattgtttttacggatcgtccttgaaaaggcttcttgttaagacataagaaaagtgtgcaaaccaagtgtttgacgaaaagaaataaagataaagacaatatgaagaaaagtgcagagcaaaaataacgaatttaacatgaacaaaatgttaaaaaaatagaataaaaataaaaaggcgggaaagacaagaaatggaagaagacgccacaccttatgaaaagtgataagtcccgtggggattcgccacaaagattatagaaaacctttgataagaaccaatgtttggtccaattaagaacccaagaggaacttcctctcacacacttttaaaagtgtaaaggttttattcaattcaaaggtgcttacataagacaaatgaatgactatttatagtcaacaagtggtgtctctctcttttttctctccaatgtgggacttcagtcacatattccttatactaaaaaatgtaatttgtgctgaactttatgtcctattttcatcatcatagatgcagaatttggacttgagactagaaatacaatttgtagggaatctttagagctttcaaacgcatcaaagaatgcctaaaacagatatctaaaactcaagttatgttcaaaacattggaggtatctaggctcttcactcattttcttgatccttatcatgctccccttctttaaaagaattcgtcctcgaattcggatcgtcaccacctacatcaaaaggacttaggttagcaacattaaatgtggcgcttacctcatactcaccttgaagagcgactttgtatgtcttgtcaatgatcttctctaagatttggaatggtccatctcgtgtaggcaaaagttttgatttcctttggataggaaacctttctttttttatatagagccaaacccaatctctgggctcacaaacaactcttcttctctctttgtttgcttgtttagcatattgctccattgttttctcaatttgtgctttcactttttcatggagcttagtcataggcacaaaatccttttggtgttcaatcccccttaacggaggtaaatcggatgggacactctttggaaacacatctccaaatccctgcaagagagaatcaacaacactaggaaaagggttagctttagaattcaaatacaagtctttatgcacgcaaatgtacatttcttgttttgccaaacatgttctcttgatatcactttccctagcaattaagttttctannnnnnnnnnnnnnnnnnnnnnnnnnnnnnnnnnnnnnnnnnnnnnnnnnnnnnnnnnnnnnnnnnnnnnnnnnnnnnnnnnnnnnnnnnnnnnnnnnnnnnnnnnnnnnnnnnnnnnnnnnnnnnnnnnnnnnnnnnnnnnnnnnnnnnnnnnnnnnnnnnnnnnnnnnnnnnnnnnnnnnnnnnnnnnnnnnnnnnnnnnnnnnnnnnnnnnnnnnnnnnnnnnnnnnnnnnnnnnnnnnnnnnnnnnnnnnnnnnnnnnnnnnnnnnnnnnnnnnnnnnnnnnnnnnnnnnnnnnnnnnnnnnnnnnnnnnnnnnnnnnnnnnnnnnnnnnnnnnnnnnnnnnnnnnnnnnnnnnnnnnnnnnnnnnnnnnnnnnnnnnnnnnnnnnnnnnnnnnnnnnnnnnnnnnnnnnnnnnnnnnnnnnnnnnnnnnnnnnnnnnnnnnnnnnnnnnnnnnnnnnnnnnnnnnnnnnnnnnnnnnnnnnnnnnnnnnnnnnnnnnnnnnnnnnnnnnnnnnnnnnnnnnnnnnnnnnnnnnnnnnnnnnnnnnnnnnnnnnnnnnnnnnnnnnnnnnnnnnnnnnnnnnnnnnnnnnnnnnnnnnnnnnnnnnnnnnnnnnnnnnnnnnnnnnnnnnnnnnnnnnnnnnnnnnnnnnnnnnnnnnnnnnnnnnnnnnnnnnnnnnnnnnnnnnnnnnnnnnnnnnnnnnnnnnnnnnnnnnnnnnnnnnnnnnnnnnnnnnnnnnnnnnnnnnnnnnnnnnnnnnnnnnnnnnnnnnnnnnnnnnnnnnnnnnnnnnnnnnnnnnnnnnnnnnnnnnnnnnnnnnnnnnnnnnnnnnnnnnnnnnnnnnnnnnnnnnnnnnnnnnnnnnnnnnnnnnnnnnnnnnnnnnnnnnnnnnnnnnnnnnnnnnnnnnnnnnnnnnnnnnnnnnnnnnnnnnnnnnnnnnnnnnnnnnnnnnnnnnnnnnnnnnnnnnnnnnnnnnnnnnnnnnnnnnnnnnnnnnnnnnnnnnnnnnnnnnnnnnnnnnnnnnnnnnnnnnnnnnnnnnnnnnnnnnnnnnnnnnnnnnnnnnnnnnnnnnnnnnnnnnnnnnnnnnnnnnnnnnnnnnnnnnnnnnnnnnnnnnnnnnnnnnnnnnnnnnnnnnnnnnnnnnnnnnnnnnnnnnnnnnnnnnnnnnnnnnnnnnnnnnnnnnnnnnnnnnnnnnnnnnnnnnnnnnnnnnnnnnnnnnnnnnnnnnnnnnnnnnnnnnnnnnnnnnnnnnnnnnnnnnnnnnnnnnnnnnnnnnnnnnnnnnnnnnnnnnnnnnnnnnnnnnnnnnnnnnnnnnnnnnnnnnnnnnnnnnnnnnnnnnnnnnnnnnnnnnnnnnnnnnnnnnnnnnnnnnnnnnnnnnnnnnnnnnnnnnnnnnnnnnnnnnnnnnnnnnnnnnnnnnnnnnnnnnnnnnnnnnnnnnnnnnnnnnnnnnnnnnnnnnnnnnnnnnnnnnnnnnnnnnnnnnnnnacaagaaaattgttaccctttttttttcacactaatacaaatgatttttttttttatgcccaattgtgaacagtaatggtttagtttagaatgaggtgcacaaaataacgttgttacagcaataatatgagcagaatattatgaagctgtaaattgcgcaaaagatagacaaaaagaacagaatgataaagaacgagaatttaaagaacagaatgataaagaatgagaaataaagaacggaatgataaagaacgcaaacaaaagacaaaggaaaaagacagaaattaaaagaacaagaaattggccaattctaggatccgggctcaagatatcacatgatatgaaccaatatggggttcattgtttttacggatcgtccttgaaaaggcttcttgttaagacataagaaaagtgtgcaaaccaagtgtttgacgaaaagaaataaagataaagacaatataaacaaaagtgcagagcaaaaataactaatttaacatgaacaaaatattaaaaaaatagaataaaaataaaaaggcgggaaagacaagaaatggaagaagacgccacaccttatgaaaagtgataagtcccgtggggattcgccacaaagattatagaaaacctttgataagaaccaatgtttggtccaattaagaacccaagaggaacttcctctcacacacttttaaaagtgtaaaggttttattcaattcaaaggtgcttacataagacaaatgaatgactatttatagccaacaagtggtgtctctctcttttttctctccaatgtgggacttcagtcacatattccttatactaaaaaatgtaatttgtgctgaattttatgtcctattttcatcatcatagatgcagaatttggacttgagactagaaatacaatttgtagggaatctttagagctttcaaacgcatcaaagaatgcctaaaacagatatctaaaactcaagttatgttcaaaacattggaggtatctaggctcttcactcattttcttgatcctcatcaattgacatgccggccggtccatctgaaattttggtcattgctgacaaccatgcaattccttctcatgtagctgctgatttgcttttcctggtttaataagttttaaaatacttctattttctttacaaacattatccactattcatattcacaatgagaattgtaatctttctttgtcatcctcttagaaacaaaattcatgctctagtgtaatttatacgatattctaaaaatcttttatttgtagtttctacattatgatgctagttttccgaaattcaatataggatgaactcataatttgcgtagcatgtagaaaatgcgaattaattgaagcttaattactatatccggaagcaaccaaatttgtaaactgaggatatggagtatagaagcatttgtttgtttgtttagaatctgattatgattcagtgtgctcttagttgacaatgaatgtgcaaatacactacactagagaaaacgaactggaacacctttcttcaaataaggctcaaaatctgcaaaaatttaaaagcactaattaaccccaactgacaaaaccactacaaacaagagtacaagaccttaaacctgctaaaaatccattttcatttgttatttataagataaactagcttagttaagttttaaaatccaatttgaaaaccattttttaaaataaataaataaatttgaaaaccaattcaaaatcaattcggctctgaaaataattttaaactagtttgaaaccagttcagaatcggttcagctctgaaaacagttataaactgattcaaaatcagttccgtttagaatcggttcagaactagtttcgatccagatcgcaaacaagttcacaaattcaggttaaaaacttggaaactagtatggttctatttttttccgaatcggtttttgcccagccctactccctaatctcatcattataattgtcgggtaagataattgtcattttagttcttcaagataacattaattactcttttccacatatatctcgtaaagatcaatgatggactacaaaatctattaatgtattaataattatacaaggttaatttaaaaaaattactagtttctttcgtctatttattactttttcttgatctgcctagaaaaaactagtctaggatgacaattttgggatggagggagtacttcatttcatcaaacatgtgatgtgagacgagatgaatcgttgtaataaaaaccataacattgataataagatgagtggtggtggtggcggcgtatcgtcatgaggagcttagcgaagagtgcgattccgatggcgacgaatgtgataaccctaagtcctagcgcgtatggcgcaagtctggacacgaacggcgctgaattttgcagaaaaccttctgcagaatccttctgcataattgcggcgctccaggcgcgggactggcgctccaggcgccagaggttctggatattggcgctccaggcgcggggctggcgctccaggcaccagaggttctggatattggtgctccaggcgccagaaattctggaatctggcgctgggggcacgggagcggcgcggggagcgccagaggttgtgctgggccactatataaagtgaaaaacgcgaaaaaggagaggaaaaacagtttcttcttcctcctccagccctgacctccattagtgactggtccaagcttactaggaccttgtttcttgctttaaataccttcctttaacctttgattgtgagagaaacactttggaagcttgaatcattcaattgttctcttgaaaaaccccttttgagtgagttttggaatctccagagaaaaactcacagaacttgagagtggctgagacccactgcgtggaaaggacaccagagctcaaggaggttgtccttgggtcttctttgtcaccttttgaggtaagaaactcaagtttctccgtttgattttgattttgggggttctcatgaatagtgacccatatgagctggggctagaattagcgcaggatcttgtagagaattgtgttcagggggttgttttgatgaagttagagccttcagaaatcattattgatgaagtttgattttggctctgagctatacatgcatagagaaagggctggatgtatggctattttgaaccttagagcagatgataaagttgctcatgggatagtgtagaggctgtttatgagctgaattggttgcattataagcttgaatttgataaggctaaagtaaggatatgctttgtgttagcctgaacagagtcttaggagagactctggagccttggttaggctgagagggatcctagtaagggtctgagaatcacttgtaaagtgattagttatgggttatgtgggaaggattatagttcctttcgttctaacggcttagaaccgttactgatacgttaagtgttgctcttatgtaggacgtgagcttgatatttctggtggtggtgaccacgaggccgggagagccggtgttttgcctagagcaggtaagctcttggtctttgcatgtatgtcctttactgtgttccaccatgctcttaatggagtgatggttctgttgggagtacctgcatgtatatggaaattgcatattgtgtgtttgattgttgaattgatgcgtagcgaaatgagatgtttgaaatgtaatttgaaccctgtgatgggtgaatgatatgtattgatttgagatgcttggaatggaatgtgaaactgtgatgtgagattggtgtgtatgattatgagttgtctagcctatgatacgcatgattgactcttggttttgaatgtgaattcagtgaatgaatagaatcctatggtagtaggatagatgacatgagattgagtaagacctgctgtgagatgttcctgttatatagatgtagcctccgaatggagatgttcctatatacacagaggtagcctcctcaggcaattgtgttgagatagatgatgagaagtgcctgttatatagatgtagcctcctaagtggagatgttcctatatatacagatgtagcctcagatagttttgttgagatcctggcatgagatgttcctagtatatagatgtagcctcctaagtggagatgttcctatatacctagatgtagcctctgcaggttagtgatttatgctgtgaacggttgtaggccgtgcttgggtcacttgattattgataggtggatgtgaattgagatttctgacagcttgatgattgtctgaatgatgttctggcatagaaccggagaatgaatgttttagatatatttttccatgtatgtgtttgaaagtgaaccagggaaaggaaataccttcaagggccctgagtttactgggattttatatctcacccttttgtgggacttatattttttgcaagtgattcctcaggaggagcagatagatcccaaggcaagaagcctatgcagggatagttgctatttgtaaaccttaggcatagatgatatgagcatgtgactctgatgttttgtatactgcctttggtttaattttggtatcctaaggcgagatattgtatgtacagttttgtatttaaacagagactttatgtatattcactatattataatgcatgagtggttatgttagtgacatttgataacgtcactcttatattatgcttccaaactgcttaaactctgatgattttaattaatgatagtggttaaggcaggttaatgaccctggttttgtacggggcgttacaacgaagtacatggggatggtggcggtgtcgaggaaggagagggattcgagaaccatgaggatgaattggtccttgttcttagagtgtcgagtctttctcttcttctccaattccaacgctcttctcttcagtgttttcgttgaggcgccatcgccgcaaaaagtgtgcaacaatctatgcctcacagcattcatcatttaacgttcatcaaagttcaaaccacaaatttaatgtggcagtgttttgcttccttcgaagaaacatcgtttattcgttgttatttgggttggaagtggaaagtccaagtgaatggacaatattactatacaaaactaagttgtggttactttaatggaagaaaaaaattaattaaattaaaatataaaaatgtgagtcctaaggtataaaaaaaaattgtatattatttttctccttcaaaacaaacaaaaacctaagaaagagagagaaggcaaaagtgaggaggtgagaaaaagaaaagaaatagaagaaaaaaattaacccacaatgcaccccacaatgacatatgacgaggatcaaatttattttatattactataaactatagacaagattgaagtttaataaaatagaaaagaagaaaaatgaaattttaaatttcaaggactgggttaatatataagaatattgaagttaaaaaaaataatattaagagaatatagaaaatatgcaagagggtatagtagaaagacaactcttaattcaaagcagcatccttaaaaaaaaattcaaagcagcaaatctagatcattttattttctatctatttagtcaaatacaaatataaaataacaaccacaattggattggcctagtggtagagatatttagatagtatacaactatnnnnnnnnnnnnnnnnnnnnnnnnnnnnnnnnnnnnnnnnnnnnnnnnnnnnnnnnnnnnnnnnnnnnaaaaaaaaaaaaaaaacagtaaatcaataattaagttatgtttgagtattgattaataaagttagagcctcataaatttaatatgcggcacacaaaaaattgtatttttttttcgtttgaacattttttttatctcatatattttaaactgagttgcagaagtgatttgatattgctatgctccttcagcataattaaaaggataatgttacaaggcacttcaatattataaatatccatttgatactctttatttttctttatttctctannnnnnnnnnactgggttaatatataagaatattgaagttaaaaaaataatattaagagaatatagaaaatatacaagagggtatagtagaaagacaactcttaattcaaagcagcatccttaaaaaaaaaaaaattcaaagcagcaaatctagattactttattttctatctatttagtcaaatacaaacataaaataacaaccacaattggattggcctagtggtagagatatttagatagtatacaactattgtacacaaaataggaaaaatacaaacatatataaaatacttggtttaacgagtaaacgtaaactctgtcttctggatatagtacatcagtgtcaaacttcctatttaaatgtaacacatcatagcttgacattgtcaactttgaaaatgttctataacattattgcttagaccacacgtacgcaagggaaaataattaagcccattttgccattagagacatgccaccagcacccaaaaacacagccacgtaagattttaattgaagcttaatgctaccctgcaaccttgggctcatgaagtcagcagagagaaggtcaaccaaagccatgtagattaaaagcccggcagatgatgcattaagcaaacccacggtgattagtgcacttgggctgttctctttgtaggtggtggacattccaattcctaaggcaattccaaatggggttgtgatggagaaaaagaacaccatgatggccttctttaaaaacttgtaatcagcctaatcaaaaattaaaggattaattaattttagagaaaaaatattatatattacaccatcattcaatcacaaatcattatgtataattaatttgttaatttttataattattatcttaaaaaatatatcaatgatgatttataattagataataacttataatatataatcatcaaactcttgattttatcagcataaaaatgtgaaacttaaaagatgtgggaatatgacgtgctcttattacctgtagaatgcacccaccaagacccattccttcaaacatttgatggaagcacacggcggctataagacctcttattgtgcacgtgttatttgaggctcccatgccaagtcctatcaccactgaatgaacaataattccaagttctaatacctgcatttccaacatcagtttcatgttaaaatgctcttatttgagataaattattatgattttagttattttttatgtgatatataattaaatattaatgatttttaaaattaaaaatttcaattatatgcaattgaaaattttagttgagacatgattatctaagatcatataataatttatacatgtgtgatagtccttagagatgtaaaatttgaaaattcacaataaccctcgaagaaggaaacatgtaagggcgtaataatctagcaattggatgtggtaatgtaaaattttaaaaagatttactattttttttctccttaaattttgtaagatttatatttagttcttaaataattttttttatcggccgatatcttttaacttttttttttcatcccttatttttagttcttggtggggaaaaaaattaagagactaaaatcagtcaaaaaattagaaattgagtataataaaaccatgttaaaatagtatataaaatttaaaattaatcattgactaactaaaaagctttgaaaaattattatatggttcaagactaattatcacgtaacacgtaattaggtcttatttattcttaagtaaatggtccattcttgtaaaaaaaagagtaaatgacccatttagttagtcattaaaattgaatcttgtggccacattagtctctaaaacttaaaagtctcaaataaaacccttaaatcttttaggatttcatttaaccttaaacatatcttatagttattagcacttaaatcaatgcatggactagagataaatttgaagaaaaaaatatttagagacttaaataaaactctaaacctaaatgattttagagattagtataacaatgaaatataatttaatggactaaactaattatttagtcttaattgtttcacatcaattaaaaaactaaaccacatgacagtgatttcacaccactattaccacataatatttttttgctggatggatccccataattaattttgagatagaaacactagtcagtaacaaaatcgtatttaatttgcaagagtcaaacaatcttaccatggcaacaacacgataacgtagaagctgcgattctttggcatctatcttagtctcatgatgagcatggtggtggccatggaaatgccctaagttaacagcacccacctctaaattttccccaccaccttcatggatgctctcaccaggaacaacctcactagtcgtcctacacttcttggtgtaaacactagtggccaaggaatccaccatcatcgtgattatggcggagaacattgcgacgagacccgaaaacggaaactcgtgccacggcttctccttcaagcaatccgaccagagcatggcgaaggaatccgggagcacgtgcatgaaacccgtgccgaggatgattccggcggcgaagcacttcacgattatgaagaggtcgttttctgggcttagggcagggactgaacgtgtcactaagggtagggttatgccaattatgcttgaggctaagatggtaaatatggctatgatttttagaggtagggctttctttttgttgttgcaactgtttttggattcggcttcacaatcggccgtggcttggtgtgtgaggagagtgaagataatgaagaaaacaaaggttgttttgaatagggttagtgaagtggccattgtttgtagttgtttctttcacaaactaaaggacacttctcacttgtacttgtatattttgcttttgtttgaggttctttatatagacgttacaattgccttgttttcattcaagaattaatagtggcaaactattaatttactcctgaatttataaagcattgttagtctctaaaagtaagaaataacaactccataagctatcattttaattccttaattaattgttattgttttaatcaatgaaaagtatgttgatattaaaaaccaatccaagtttcaaaccacaatttttaaaaaaatgatttgatttgagaccataatttcatatgcaactcaactacgattgatgtcacttctaaatcaatttaactcgacaaaaaatataattgtagtcacaaaaaatgttcaacaataaatgaaaagatcaatttaacttaaaatgacacacaaaaaactaaaataaaacaaaatgaaaaaaaaaaatagttggacaatgttgcaaatgaacttagtgagtttaacaagatgactgcagcacgacgccacggtgagaggaaggaaggagaggttggtaagcggagcggcaaggtagaacgactgagtgaaactacgagagaaagaaaaatagatcaataggatttctaaaattaaaatgggtttaaattgaaactacgttatttcaactataaccaggaaaaaaagtgattggatccaagttgacgaatcaccggtttaaccgcaaacccgacaaggttaattagagttgtcccggatcaaaagtgtacccgatcgaacttgtgactcaacccggtttagtcattggatcacattttcaatccaaatcttaaaactttgctcacacttaatattttaaattttgaactaaagttaaaaataaattatattttcaagattttttaaaaattttattactttaaggattaaagtgacgatgctcacatttctgaggacaaatttggttattcaaccaattaataatagtaaacaagtgcacacatgataaattattccacgatggatgaataacaccagctaatgtgactgcacaacagttttaattataagaaggactaatattattagtacaaaattaaccgtacgaaaatgggtactacggcaaggatcaccaattaattctaataggatgatgaaaataattttatatacaaatgtgtagggaagtcaatgcatatcacatacacacagccaagtggaaataatttacgtttgcataaaatgaacaaagaattgaagtgttcatggatcatgctgtttatggtttttataatctatgccattggtttaaaaattgtgattaaaacaagaagtaaactcggtgacgtatgtgtgacccttatcaacgagcataaaatatctgaattgattttataatctatgccattggtttttataatctatgccattggtttttatgattttttctcaatgaatttatcttattagcttacaatacttaatagtatttcaacttggaatttcttgtaacatttgtattgttatagaagtttattctatgtaaataaagtgtctaataaataaatttatctcattagtttataataattcttaaaatagtattttgattctacaatttactgctacattttaatttctaatttcctccctcttttaatattgcatatttttaatagaataatactacactgttaattataattattagttgtttttcaaaagaacatttgattttaagaagaaacaaaattataagaattcaaaattaactagaattataattaagtaaaggttatgtttggcaaaactaactgaaaagttagctgaaagttgaaagttaaaaaattaacttattcaattataagtgtttgataaaattagttgttaaattagttgaaaagtataaaataactaaaaaataataaaattatgatttatttaaaaatggtaagcaaaaaatttgatacatatatcaaggacaacatagggaagatataaaaagctaaaaactagtgttttaaaaaaatattattataagtagtgtttcaaaaaacactagaatctattgaaaaatttgtttacctaatagccaaatgagtttttcatctacttaaaaagttagaagtnnnnnnnnnnnnnnnnnnnnnnnnttttttttttttttatgaagttaatccattcagacatgtccaaataaagttgtgttttatattattaaaaaattatatatatatatatatatatatataataaaaataaatgaattaacatttattaaaaaattattttttggcaattctacttgtgcctttattgaggcaagttgtaactggttgaaacatactagtccaacttaccactcctaactttataaattcatttgtagtttgttcaattcttataaatcaaaaatactctctcgagttttaaagttcctaattttggcttctcacactaggtgatccttaaatcttttttttttactattcacatttctcaactatcggactataaatctcaagtttaagtcttgaatatccagtttcattaagtatcgggcacgtaaatcaattggtgcatgattattttaacttaaccagtagtctcaagtttaagttctggatatgcagttacgttaagcactcaaacaaagaactttgttgtccataggaatcctatccgactcaagtatattatctctcataaaagatacacatcatcttttctaaaaagatacataatatttgtgatctctgcaattaaatgagacaatatataattttatttcttttctcaaagttacttatcgatacaaattttagggtcaacaagataaatttattgatgagtgatttgtaaatagtttttgttagtggtttttaactcttaaagtgtcttaaatggatgtaatttaagcaataaattttgagtttttcgtctcatgccaattgatccgtacaattatacatcatagttaaacaacacatacacattttgcttcaatggtatagttttacgcaattcttaaattattcaacttatccttannnnnnnnnnaaaaaacagtggatattcaaagattaatctcttttgagatattaagattattgaagtgaactttaatttactttctcaacagaacattttttaatacaaatagttaggaattaaatcatgaccatctttttcgaaggacccaactttgatctattaactatgccaatttttgtttataataagctaaaattaaaacgaacttataagaagatcataaaccacttttataaacttaagtcaaacacctatgtaaatttcatcataaaataatttaaataagctttgtaaactcttctaaatgcaccccttattcggctaagatgtttaaacactaattcattttaagctttaagtgaaaaccaagacactagatttgtcccatgatcagtaacacgatatgataatagtttacattaataattactatttttcattttaacattttttcactagtaaaaaaaaatgttcaataatcaatcactaccatttgctgaagtttaactagattctggcaagttggttaagttagaataaaaaattggtccgcgcatttgatatatttttcattttagtctctatatgaatatatatatatatatatatatatatatatatatatatatcacactttannnnnnnnnnnnnnnnnnnnnnnnnnnnnnnnnnnnnnnnnnnnnnnnnnnnnnnnnnnnnnnnnnnnnnnnnnnnnnnnnnnnnnnnnnnnnnnnnnnnnnnnnnnnnnnnnnnnnnnnnnnnnnnnnnnnnnnnnnnnnnnnnnnnnnnnnnnnnnnnnnnnnnnnnnnnnnnnnnnnnnnnnnnnnnnnnnnnnnnnnnnnnnnnnnnnnnnnnnnnnnnnnnnnnnnnnnnnnnnnnnnnnnnnnnnnnnnnnnnnnnnnnnnnnnnnnnnnnnnnnnnnnnnnnnnnnnnnnnnnnnnnnnnnnnnnnnnnnnnnnnnnnnnnnnnnnnnnnnnnnnnnnnnnnnnnnnnnnnnnnnnnnnnnnnnnnnnnnnnnnnnnnnnnnnnnnnnnnnnnnnnnnnnnnnnnnnnnnnnnnnnnnnnnnnnnnnnnnnnnnnnnnnnnnnnnnnnnnnnnnnnnnnnnnnnnnnnnnnnnnnnnnnnnnnnnnnnnnnnnnnnnnnnnnnnnnnnnnnnnnnnnnnnnnnnnnnnnnnnnnnnnnnnnnnnnnnnnnnnnnnnnnnnnnnnnnnnnnnnnnnnnnnnnnnnnnnnnnnnnnnnnnnnnnnnnnnttatggacctacatatttaatttcttcaaaaatataatatcatttaaatatattgttccaaaattaaaataaaacacaacaaagagtagaggtccattgcagcaacaaagctttcaaaatggaattaattcagagaagttgttgaccaaggttcagcgccgtcgagaatgagaaatgagggggagggttagggtttcgggattttattcttatatatataagggtaaatttataatttaattatgacgggggcgggtgcggggtgggggcgggacaggtatcatcaataccaaacccacccccgtccccgagtttttgtagcggggcgggggcggggcgggtattattaataacaaatcggtttttccccgttaaaatcggggcggattttgacgggtacccacgggttcggttaaaatatcgtactttattttagcccatgctcagaaaagtctatgatatctatgtgaagaaaacttaaaatctaacgaaaactaatttgtaaatatttcatgtaaaaaccaaaacaaataacagtatcatatttggggagtaaattattaatttaaccttcttaagaattagataaatagattgaaaacaactatttattgaccaaactcgatctataaagaaatatgcaaagtaaaaaaaaaaaaaaaannnnnnnnnnnnnnnnnnnnnnnnnnnnnnnnnnnnnnnnnnnnnnnnnnnnnnnnnnnnnnnnnnnnnnnnnnnnnnnnnnnnnnnnnnnnnnnnnnnnnnnnnnnnnnnnnnnnnnnnnnnnnnnnnnnnnnnnnnnnnnnnnnnnnnnnnnnnnnnnnnnnnnnnnnnnnnnnnnnnnnnnnnnnnnnnnnnnnnnnnnnnnnnnnnnnnnnnnnnnnnnnnnnnnnnnnnnnnnnnnnnnnntctcttctatttctttctctttccaagtatagaggaacaataaggtatacacaaaacattcttctaatttaaccgatagggatggatcgacgtaacaataagttgtagacttaagttaaccaaaagccaaccacattaatacaaacaccaaattggtgcaatcagttattaagttggccatagacccatgatagattccatattcttatctataatgtatggaacaatacttactgttgacaaagaacttctagtttgcacattgcatgattacgatcctaaccagacaatatttttaaatttgaattatttttctttctttcttatttaatgtatagaaacttttttaattggcgagcatttgtgataagttgaaatttttaagtaaacatataatttagtctctgaatatataatagattctctatttaaatttaatctctatacacgtaaatgttattgctttaatttagtcctagttaccatcattaacccccttatgcatttttaatttggttccaatatatatacaatatttttagtttggtccttatatatataacacattcttatttgaatccctataattagaaaccaaataaagaatgagttatacctataggggtcaaattaagaaagttttacatatatagtaatcaaattaagaatgtgtaagagtgtcaacggttgacatttgaccccaggaatcaaataggtaatatttgtaatataggaattaaattaataagtttttacgtgtaaggaccaaattcaaaaactaaaagactaaataataattaattgagcccaaacccataatgattaatctacaaaattactaatccactaagattgatacaatgataaaaggtttagatattaaacataaggtcataaattttaacgtcgatgttactattaacccaaataaaatactacaaaattattaaacagtaaagttattgtcatggaaaattattaggatctttctctacactaaaatattttctatactcatccaactcaaacttgaatcaaagtacgatgcttcagtttctggtcagaagcctcaacgagtatgatgtggaacacccggataaattgagcttcttagtcctatttattttgttttatttctcgatctattatttagtttggttaactaactatcctgttactaaaacccaaattaatttttcaataacaaaaaaatcctattgggaacaactattcccactatcatatttgctatttaagctaccaacctctatgaaattcctgctttgcccactcaccaaattcctatacttcctccccttctcctcggatccaaaatcacctcccccaccctagtccagatccaaaaccctcgcaccacccctccagactgcactcacactcatcctgagagttccaagcattgtcattgtcaatttgtgttgcatcggtcaccttgccctcgtcattgatctgcgttgcatatgtctagattcatgcagcccaccccaccctgtcgtcgatctattttgttgttgttttttaatctttgttgttgttaatgggtttgggatgatgatcgaggtgggcaaatctttgttgtggggttgttgagccaataacataaatattattccattgttgcacagtgtacaacagaatcgtatttccattactttatttttttcatcccattgtgtgcaaagaaaatacgattgtgttgtacattgtacaacagaatagtatttttgttactttattttttttacccacatgtatagaaagaaaatacgattacattgtagacttgttcaacataattgtgtttccgtttgaaggatatttttggaagaaaaaaataaaacccacatgggtagtgccaatagtagttcccttcctatttattcgttgggattttatctctattaaaaacactagtttcgattcaaacgtgagagttctcgggctccagttttacgtttaggcccatataatgattgggctaactacaaacaagtaaatcaagggaattaaatcatctcttcgcctataaatgtattttcttcaccttgatagttgcaaaatggtttaggcattagagttagggcgtttgaaaagttgtgggattcgatttaaaaacaactgcaaagacttaataaaccaatttcacacttgaataagttatatttaattcctctacatgtccctcaggcctgaacttttatcaaacttttaaataagtttttaagttttttattttaattgaattcttgaacttgtatttattttttaattaggtccctgtattaggcataaaatttttataaaaaagaaaaaatacaagttcagggatataattgaaaaaaaaaaacaaaaacctaattaaaaattatcaaatggttcaaaaacttacaagttaatttaaccaataaattatcgttactaatagtcatttcaaattaaatttcctcattactgccatctatcccagcttttatccttagggttttaaactcacattcatttctggattcagaataaccatacaacgaatagcttgttattgtttggaagcgtaattcttttccgactatataacatgtctgtccagcgtaaacttatttttcgaactaaataattatatgttatgaattgaaaaagagttattcgtgcaattatcaaacaatattcctcttgttcaaatcatttaaaaactacatatgtataaagaaaaatcacattttaataggagcaaatcgcagaaagaatgttcagggacatccgataaataggaatataggaatgaaaatataacaaaggaaggaaaaaatcagagtagaatatgcacgcataaagagtgttgtagtttcagtcacaccaatattgcaaattttaatatctaacttatcttttaattgaaaaaaaaaaatagtacgataagaatatatgaatctatcattagctgataatatatgatcaaaaggtttgtgctataaaatagcatttctaaaatcaagacaaatcattcatattcatagataaaataataacatattcaataagagtacatcaaataaaataagaaactagagtatgtatatgcacctgattaatcttgaaacgtgaatatgctacgttagaagccatgtgtaatggtgaatttggtgggtttcctctttcctgaactaggtctagttgcttcttcgtgtctttggtagctggttgaggcagagaaaaatacagaatggaagtaacgtgcttccactgccactgtataactgccaccataataattgttgacattaatttcactcctaattacgtgttaatgggaggacgtacagaacatcaatccttcttttaaatattgattgcttttaaataatgggttgaaaagagtgataccttttctccatggcagttggtacttggaacattttatgtgccatttgacgttgattgatattttctctttaactcgacatctaaaaatgtatttcctatatacaaattttaatgtcatgatgatgcagttagttaggatgtaatttcttaacaggaaaaacgattcaagctgttgttgaagttatctaaatttctgatggtgcacgctaacaacattgcgtaacctatataagtatatatacccgactataaaacatcattctatttatttattctatgcaaattattttaagtcattggaattgctctaaccatatagaggagtaaggtacatcgaagatgtgagggtttagagctctctaatttttccttttgatttctgcgttatatgttgagataacaaagggggtgtaatttgctgattaatctgtctaacttgcacaaaaataaaaataaaaaaaaaagatatgtagtaaaaatgacaagataagatacatgactcaattcatcgatttgtcttaaccccttaacgaactcactaactcaaagggttgagggtaagatgggttggattgatccatcaattgatatacttaacctatttccctaaaacactattttttttttttttatgaagttaatccattcagacatgtccaaataaagttgtgttttatannnnnnnnnnnnnnnnnnnnnnnnnnnnnnnnnnnnnnnnnnnnnnnnnnnnnnnnnnnnnnnnnnnnnnnnnnnnnnnnnnnnnnnnnnnnnnnnnnnnnnnnnnnnnnnnnnnnnnnnnnnnnnnnnnnnnnnnnnnnnnnnnnnnnnnnnnnnnnnnnnnnnnnnnnnnnnnnnnnnnnnnnnnnnnnnnnnnnnnnnnnnnnnnnnnnnnnnnnnnnnnnnnnnnnnnnnnnnnnnnnnnnnnnnnnnnnnnnnnnnnnnnnnnnnnnnnnnnnnnnnnnnnnnnnnnnnnnnnnnnnnnnnnnnnnnnnnnnnnnnnnnnnnnnnnnnnnnnnnnnnnnnnnnnnnnnnnnnnnnnnnnnnnnnnnnnnnnnnnnnnnnnnnnnnnnnnnnnnnnnnnnnnnnnnnnnnnnnnnnnnnnnnnnnnnnnnnnnnnnnnnnnnnnnnnnnnnnnnnnnnnnnnnnnnnnnnnnnnnnnnnnnnnnnnnnnnnnnnnnnnnnnnnnnnnnnnnnnnnnnnnnnnnnnnnnnnnnnnnnnnnnnnnnnnnnnnnnnnnnnnnnnnnnnnnnnnnnnnnnnnnnnnnnnnnnnnnnnnnnnnnnnnnnnnnnnnnnnnnnnnnnnnnnnnnnnnnnnnnnnnnnnnnnnnnnnnnnnnnnnnnnnnnnnnnnnnnnnnnnnnnnnnnnnnnnnnnnnnnnnnnnnnnnnnnnnnnnnnnnnnnnnnnnnnnnnnnnnnnnnnnnnnnnnnnnnnnnnnnnnnnnnnnnnnnnnnnnnnnnnnnnnnnnnnnnnnnnnnnnnnnnnnnnnnnnnnnnnnnnnnnnnnnnnnnnnnnnnnnnnnnnnnnnnnnnnnnnnnntttttttttatataaaaaaaaaaggtcaagtccacatgcaggcccacactagtacatcaacaatgttttgggttagtgggttattatagtttattaaactcattgggctggtttattgctatttgtacttctaaaatctagcaagaccgttgttaggactaagaccatttgacttttagtatgtttatgtttttagtacaacaatcacaagtatgtataaacttatagtgtttttttagttaagaatcaaatatttatcagaattaaaaaaacccataattatatttaaaactaatctaaagtgaaactatgtcaaattgtagaaatcaaagattggacttgattagtaaaggttcttaaaattatagacaagtactaaaaaaataagaaaaaaaacttttatatatttttattcaattagaaattgtcatgtataataagttattgacttttataataatttctttcaaagtcatattaataatatttttttaacagttttacattaaatgcctattaaaagtaaaagaaaagggaaatcagtaaaatggtaagtttatgggaaaaaaagttcacactaggagagaccacgaatccaacttttattggccgcaaactcattctttctcatcctcttttataagtacaaagtgaatgttatcttataagtttctaaaaagtaacgaaatcccccaagttatttgaggcatcgttccctttagaaagcaagttttgaaatacattatacacccaacattaatcacacaactctagtggctaaccatggctttctaatcaaagatctagtcacttattcgattcttaatgtgccacagtggaaacattgcaagatccccgtgaccaatatgagtgggaagctaatgctgtgaatgtagcaaatgggtcaatcagatatcacttaaaaggaatcaaacactttgttctgaagatcttagctgtaaaggagcattgatccgcacctcaaaagcacgttggatgtatatgtagaaaagatatgacaatgttcgaccaatgtgtcacaaatgggggtaagaatccacttacatatattcatgatgcattaacacaaaaggcttccacctaactagcgaataataaaaacaaatattgattcaattaattaaaaaaacaaactcctttgataaggagtagacttgattcatcctactaatatgaaaatcttattaataaataatttataaatacttttataaatgttaattgaatcttaaaatatattctaattttgtgatgaattctctgagtctaaaccacctaaatttttagacatattaaataaaaacactagctaataataactagtaaccaatttatggatcaaaggctataaaaggaaggggtccacaaatactttttgtacaaaattgggggaaaaatcaaggaaatatcagaaccattaatgtgcactttagaatgcctacgcggatgagcccaacttagcttttgtgctctcagttatcttgaccaatattgagaacccaattaattgatattggatgtgtcttgtcatcaatgaatgactctcgtgttaggaccaaaaccaactaggcaatgcacacgttgaaagatgactcgtgacttgtatgagcgtatatagctttaacaggatggtaaaggaaactatcctctttaagcaccataaagaagagagtgtccactttctatgtatagtttggagagtcaaatgctaattattgaacaaacattagagaaaatcagatttcatttacaatctcttgtcaagcttaataccataatcatatggtgacataacaatctcttggaaactatagaattgtagaaaggccttagaagaagatcaacttagttcataatttgatttacactaaatgaccaatatttgattcagtctttcaatttgtatcttattatcatttgagtccttaaaactaataaaaaatcaaataagtgtcgcaaaatttttaagatttcataagtttttataataggaccaaaataagaaaaaagagttatttccaaagtagtaatttgatgtccactcttcacattgccacaaaaccattcttaattactttaatacagatttaaattttaatttgtcttttacaatgagttgaattgaagatgatccaaatatctagaatatagagccttagcttcttgtaaatggtggccacttcctggaaaaaaaaaaaaaagcgacggatattttaactctttctttaatttcttttgattcgaaagagtctgtggagttggccgttgggcatttcaatcgttgtcgcttttctccttttattattcagtttggcgtgcagagataaaaaatatatattgtacggaaatgtgatagtgacccctttttatacgtgcgtgcatgatttccttttcggtttccatttggtccagtatttatttttacttttatgataaataatcaaattcgattttgaaaaaaatgagatgttgataaatttatttttcaaaagataaaaatatgaatttagtttttaaatatataaaatatatgataaattaattatgtcaaaattattttattattaaattataatatttaaaaattaatttgataataaattatattttttatgatcaatataatattaaattataaaatttagtatcaattttacattaaattatcgaaaaaattaatttttcaatttttatatattcaaaaattaatttattagtatctcgtatttttatggactaatttcattatttattcttatttttatttttatctacaatttctcaacgcatttgaattcgatctttttgacaaaaaaaaaatataattctcttatcaaattttattttattttttaataaatttcaaatttattagagttttattttaagggaatagttaattaaaaaatagtatcatactatcatcaatctcatagatagatctctctgatttttatttgttgtgtactgtgatgtgatatgtcccaaatttggacgtggttgtgaagccaagctataataataataataataattaatagtagtagggcatcaaatttttttgtaacacatggtgggactcctgaaattgtgtcagagactgggttttttaggggtctgattctgatgtgtcagtgtctacttagcacatgcttccgttaatgcccaacaacaacacatgtaccattacccatcttacattggctttgacactattcctactcctagttctgccactttccaaacacctatttgaaagtatcgaagcaattaatggattctacctccataatggaggtaaggcatcatcatgccaattaccaagggggccacttagaaaatgctaaaatacaggagcattcaagtcggaagattatgactcatttagaattatatcctctctttttctttcttttcaaatgcaagttcattcatttatatgtcctatactaattattatttttagcacatttgctaaaaaaattaaaaataataataaaatgtacaaaattataatgccatgaatatttttatgttctccttttatttttaaaggaaatttctatgctctcctaattaatatattatagattaatagataagaaattgtctacacacatgtttgagcgtgcgttccattggtgcaaaatcgatttatttgtgcgtctttgaatgttaaggacgcgaaattaaataccctctaaatttagtaagtgaattatgatatataattatatcaaatatttaaagtaagaattttattgtttataataaaattatctaattcaaataagactgtttaataaataattcaatgagatttattttttagtatagaataatcgcaaatatgcattctacgaaaaattatcattattgagtcaattttaacaagttttaattcttattaagatcactttcaatgaaaaatacttgtgatgttataaaaacaatcatatatacttataggtgaagaatttaagcattttatttaatttagttgcttgattagtttaatcttcacaaaacatgacttcgcaaactctcattatttttgtattaagatgtaggggagaaaatgaagcatatgcttttgaatgagtggttaggcgattttctggttacgtgagtaaataataatactaatagtgtcttttattttatgccttctgcacaaacgtggattttattcccaaaaaacatgagggtggtggtggactcaagaaaaagaatcaaaaggcaattgaacaggaaagtggaaaaaaagatgaaaggaagaggatatatgacacttcaatcattccattccaattgagaacagaagtacatcttaaaccatgaacacctttcttttcttttggcgacagacaagtcaccagagaagattatgtattgggaaaagataaaagataaagttaggaaatactactgacaaagaggactctctttggatctctggtttatgaataaacatgtgggtcactcaacccacgtttgttaagctgggtctttgagcaataatcataaatgttttgacaattaaaaaaatgtaatgggaaaggtatcagaatcagaatatcagtatcttcacccgaggtcaccttcaatttattaaattgaagtgcctttgggcatttgcattttaattttgttgagttttatcaacactcataggagaaatatgaaataggtcataaataattgcaataacagaaaaatacatacacagttacaaatgctcattgttgatgtaaacagaatatatttttcatcctacgtagtttttagctaataatttaatactctgtattaataacttctgtttattataacgttgaataaaattaacaatgttgaaattatcaatacttcaaagtttaattatgaaattatgaaagtaaattaagatgcgaattaaaatattaagagaaagtaaaattatgaaattgcaaatcaaattttaaggtttacagtgatagaaaatattgttaaggacaatttgtaaatttatgatgagcatagaaatttacgacactccataatggtaccttttggctgaattttcaatctattgggttttgacaagtattgctgaatttctcaactgcaccatacgtggtgagctatttaggaaattatcttggtgggtctacgtaaacaaagcaagtctcacgtggaacttgtgaacaaagctaagaggcaagaatgaacaatgcttggtagagctagtaaatttgacaatcaatgcaccaacaaaaagtttatgaaaaaaaatattaatgttgatttacacatagaaggaactaatatggcattaaatttttcaacttatttaaattttcggtttgtttatttactatttaattcaattaaaataagcaataacttttatattcaactactagtatttaatatttttgaagtgggtcccaccctaataacaataattatgattaatattttatattttatttaataaatatgaatgttcaaaaatattatttaaacattaatagagtgattcagcacaaataattaacgtgagattggatcattcaaatactaataatgtttatttttcactgaatttcaaattagttaagattaaggaaaaaaactatttaacatttatttttattaaatgaatataaagtaaactttaaagaatttttgtaacataaattaaaggattatttaaaaaaatagaaaaacattttgataaaaataaataaatgattttctagccaaaattaaatttaaattatttattaataaattcattattctaatggctgcaaaagtttatgcttaacttgatatgcttatgcatattaccttgacatgctcttcttcgattggatatttggatgtaagaaaaaggagaataaagcttaatattattgggaaggtggtacaagcaagcaatacatggatgcttttgtgagtgttgggagaaagaattgtactagtactagcaagagaggacggtagcactactaattcccaagaggagatagggtctgagtttgttaacttcttctcctccttgcttggatcctcgcagagaatagattttcctaattttgatggcagtttagtaggaaacaaggtatctccagacctattccttgatctgaccagacccgttacagctgaggaagtgtggagtgttgtggctcatttgaacatcaataaatctcacggccctgatggctataatgcatgtttcttcaagaaagcctggtccatcataggaggtgacgtgactgctgccgtgcaagagttttttaactctggccagttacttagacagattaatcatgttgttctagcattaatccctaaatctgaaactgctagcagagttactcaatttagacctatatcttgctgcaacatattgtacaaaatcatctctaaggtcattgctaacaaattgaggacagtccttgataatatcattgatccggccccagtggcttttgtgaaagctagaagtatggcagataacatttttttggtacaggagttgattagaaaatattccaggaagagaaactcccctaggtgcatgcttaatgtggacttacacaaagtttatgattccatctcttgggaattcttaaggtggatgcttgatgctttgggctttccggctttgttttcaaattggattatggagtgcatctcgactacttccttcagcatttcggtgaatggcaggatttttggacattttgctggtaaaaggggattgagacagggagaccctttgtctccttatctctttgtaatctgtctggagttcttgtgtagggagcttaatggggtgaaaaacaatttgttgtttaactttcatcccagctgtgcagctctcaacataacccacctagcgttttcagatgacttggtattgttttctagaggcgactactcttccgtagctaccatttacaataagctgattagtttttgcaaggtcttgggcttatccataagtcatgacaagtcagctatttttgccttcggagtggatgatataactttggccgacctgtatgccttgactgggtttcggtctggttctttccccatccgttacctgggtatcctgttgatggcttctagattaaacgtttgtcactactccccgctcctcaacaggattggcagcctcatccaatgctggcataggaagtctttgtcatatgcaagccgactggaattaattagaggagttatagggggtatgctgaatttctagctggctctttttcctcttccggtggctgtaattgatagaattgatgcattctgtcggaatttcttgtggggaaaaggtgagttggggaggaagaagcctcttgtggcttggaaaaaactgtgtgctcctaagaaggaagaggggcttgggctgcctgttttgaaggattggaatcgatctcttctagctaaagtgctcgggaatatagctgccagcaaagagactctatgggtgaggtgggttcatcattactacttaaaagaaggctcggcctgaaattatgtttgctcaaaatcagattatgcactaataaagaggctgtttagtataagggatcaactggtagtcaaggaaggaagctcggatcaggctgcttctttactgagttcgtggatgcagctaggtaggttcaatgctgaagttgcttataattatttcagggttgagaatcctacaaaattctgggctaaggtggtgtggaagccctcaaacccgcctaaagagtctttctctctttggttagcagccatccaaaagctactaactttggaccgtgcaccctggctcaatatagggtcagcttgttgcttttgtaaccagcatgaggaatcctgtgatcacttgttcttcaaatgcagagtaattcttagagcctgggcggtcattagagactgggcaaattttcccaggaagaacatctcccttcgtggtgtgctgaatagcttggttcattacagggcatattcgggtttgcatggaaaattcaggtgtctggtcttagcgactactgtcttctgcatatggagttgccgaaacagcatccgatttgatcaacattcgttcgtcgtgtcggatctagtgaaaaaaattaaatttaggaccattagatatgctcacttgtactagtaaatgtatttttgctttttgtttcccggtgagtatagccggtgtgatgcattttgtaatattcctaagtcccagcgcgtttggcgcgaattaggacgcgtatggcgcgattcgggaagcgtctggccaaggattctgcagaattcttctgcagaattcttctgcataattctggcgctccaggcggatgtagccctgagctccttccctgagtgccttacgcacttgcaagactgataggaaagaggtggaactgaaaccagctccgtcagaaggcaccacaaccctcttctgacaacaatccagcatcatgccatacttggctaaccaatccataccaagaatgatctctagggtaggcatagccaggcagtacagatcaagcatgtactctctgccatcaagctggaaccgcacgtccttgcaacacgtgctcacccggcatctctcactagatgcggtgataacctccatcggagaggaaaaacaagtcataggcaactcaagcctaacagcaagcacatcctgaatgaaggaatgtgtagctcccgagtcaaacaagactctcacatcacaatcattgatcagaaccgtacctctgatcaagtcgggagtcctggccgcttctctagcatcaacagtatacacccgacccacggtaggtgctggcatctccacagtagccactgatgcacggcctcctgcctggttgcactctctggaaatatggcctggctggccacatttgtaacaaataatctggcctgaggagcatgtcccccaatgctctcgtccacaggctgtgcacttcggggttcgtcttcccccatgtgagccgctccggctagagtccctcttgaacttcccagaggcagagactctcacatccttgcccttaccctttccgggtgggccagaaccactggtcttcttcccttcctgtctgtctgagggaaaagactgaatgtttccatgtctgcgaagcatatcctctacctggcgacactgcctcaccaaggtagacatgtcacgagatccacttcccacaactcgctcctcgatgctcttcctaagccccctctggaacttagcagcaagtatgtcagcatcgggtaaggatctccggaaatgagcatatttggccaactcattgaacttgaccaagtactcatctacagtcatgctcccctgaacaagaccgtcaaactctgcttgcttctgctcacgagcatccctgggaaagtactggtccaggaagcaagcctcaaacatctgccaggtgatcacatccccctggcctctcagcaactgagatgtggtcatccaccactgatgggcctcgcccctcaacatgtaggtcgcataaagcaacctctggggatctggacactccatcactgtgaagatctggtccaaanctaccatcaccctcatgagtaggaggtacagaaaaagcatggtcacctcctctcatggttctcatctcatccatcatctcgcggtttgccttcatcaaggcctcattaacctctcggttagcagccatctcatgctgcatagcctcctgcatctgcctattagcagtcatctcttgctgcatggccgccaaagcagccgccactggatctggttgggcattggttgccccactgttgtttcttgatctcgtcatgacactacatatgcacaccaaacagtgagttgatcaggcccacaactagtgtccacacatgcaatagccatgccaaatgcaaacaacagtcaaaagcaacactcaaaatccatacataatgcttccatcaagaaaaccgctctgataccataaaatgtgaggcccggtggtagctgagtaatctcctcagggaaaacatccgcatcctcagggctacatcttctcatgtgagtatgcggatgtttttcctgaggagattactcagctaccacctgagagggagatcgagttctccattgatctggttcctggtgtgggaccgatatctgtggcaccttaccgcatggctcctctggagttgagggagcttaaggtgcagttggaggacttgttgtctaagcagttcatcagaccgagtgtctcaccgtggggagcaccggtgatcttcgtgaagaagaaggatggtagtatgaggctctgtgtggattacagacagttgaataaggttactatcaagaataagtatcctttgcctcgtatagatgatctgctggaccagttgaggggagctacggtattttctaagattgacctgaggtccggatatcaccagattcggatcaagcctgctgacataccaaagacagccttccggtctaggtatggtcactttgagtatcaggttatcccctttggtctgacgaatgcccctgcagtgttcatggattatatgaacagggtgttcaggcctttcttggatcagtttgtggtggtgtttattgatgatattctgatctattcccggacggaaagggagcatgctgagcatcttaagattgttcttcataccttgaggaatgatcagttgtatgccaagttgaccaagtgtgagttttggttatctgaggtgaagttccttggccatgtgatctcagcagctggggtgtcagtggaccctagcaagatagaggcggtgatgtcttgggagagacctaaggatgtatctgaggttcggagtttccttggcttggccggatactaccggaggtttattcaggggttctcccagatagtgatgcctttgactcgactcacccggaagggggttccgtttgtctggacccatgagtgcgagcagtgctttcaggagctgaaggaaaggttgactacagctccggtgttgacccttcctgaccctgaaggaagctttgaggtgtattgtgatgcgtccaagcggggacttggatgtgtgctgatgcaggataagaaggctgttgcctatgcttccaggcaactgaagcctcatgaggagtcttatcctactcatgatttagagcttgcagccgtggtgtttgctctaaagatttggaggcactatctgtatggtgctaagctggtggtgttcagtgaccacaagagtctcaagtacctctttgaccagaaagagctgaatatgagacagagacggtggatggagtttctcaaagactatgattttgagttgagataccacccaggcaaagcaaatgtggttgctgatgctttgagtagnnnnnnnnnnnnnnnnnnnnnnnnnnnnnnnnnnnnnnnnnnnnnnnnnnnnnnnnnnnnnnnnnnnnnnnnnnnnnnnnnnnnnnnnnnnnnnnnnnnnnnnnnnnnnnnnnnnnnnnnnnnnnnnnnnnnnnnnnnnnnnnnnnnnnnnnnnnnnnnnnnnnnnnnnnnnnnnnnnnnnnnnnnnnnnnnnnnnnnnnnnnnnnnnnnnnnnnnnnnnnnnnnnnnnnnnnnnnnnnnnnnnnnnnnnnnnnnnnnnnnnnnnnnnnnnnnnnnnnnnnnnnnnnnnnnnnnnnnnnnnnnnnnnnnnnnnnnnnnnnnnnnnnnnnnnnnnnnnnnnnnnnnnnnnnnnnnnnnnnnnnnnnnnnnnnnnnnnnnnnnnnnnnnnnnnnnnnnnnnnnnnnnnnnnnnnnnnnnnnnnnnnnnnnnnnnnnnnnnnnnnnnnnnnnnnnnnnnnnnnnnnnnnnnnnnnnnnnnnnnttcttgcctgtgagatctgactacacagcggaaaagttggcccagttgtacgtcagggagatagtgaggttgcatggaatccctgatagcatcgtcagtgatagagacccgaagttcacctcgaggttctggggtgcgcttcaggaagcttttggtacccagctgaggctaagcacggcctatcatcctcagaccgatggtcagactgagaggaccatccagactctggaggacatgttgagagcatgtgccatggagcagggcacgagctgggatagatacttacctctggtggagttttcctacaataacagttttcacgcgagtttgggcatggccccgtatgaagccttgtatggccggcggtgtaggactccagtgtgttggaccgaggtaggtgagaagcagctccttggacctgagatggttcaagagacatctgagcagatcaagatgatcagagataagttgcttaaggctcagagtcgtcagaagagctattatgatcacagacacagacccctgcagtttgatgagggtgatcatgtgttcttgagattgtctccggtaacgggtgtaggacgggctttgggagtaaggaagctgagtcctaggttcatcggtccttatcagatccttcagagggttgggccggttgcatataggctagctttacctccccagctggcggggctgcatgatgtgttccatgtatctcagctgaggaggtatgtggcggatccctcgcatgtggttgagcccgatgcggttcagattagagagaacctgacaagtcctacaagaccctgcaagatcttggatcgaacggagaagcgcattcggagcaagaccatccccattgtcaaggttcagtgggaaggaaggacgcctgaagaagcgacttgggagcgggagcaggagctgttgcagctttatcctgagttgtttgacaggtatgatccttggttttgcggacaaaagtcctaaaaaggggggttgaatgtaatattcctaagtcccagcgcgtttggcgcgaattaggacgcgtatggcgcgattcgggaagcgtctggccaaggattctgtagaattcttctgcagaattcttctgcagaattcttctgcataattctggcgctccaggcgccgctgtgctggagtgtggcgtcggaggcgcggaagcggcgctccaggcgccgtggtctctggtggacggcgctccgggcgccaggtcggcgccggtggcgccagaaccactttgattttcccaacaggcgcccttggcgccgtgggtggcgcggttggcgccagatgttctggaagttggcgcccttggagcaggaggcggcgctcttggcgccataggttctggaggttggcacttgaggcgtgggagctggcgccggtggcgcgggactctctggagggtggcgcctgaggcgcggaggtggcgctcttggcgccagaggtgctggaggctggcgctcttggcgccggggtcggcgctggaggcgccgtggactctggaaggtggcgctctgggcgtgggggccggcgccggaggcgccgcaactcgggcagaccccctatataaagcccatttcgcgatttctgaacccaaaaccttctcttcttcttcctcagacctcctacctccattgttgagtgcccaagctccattccttcaccatacttcaccaaaaacacttccttaagcttgttttgtgatggaaatcatctctagagcttgaatccatcctcctttcactttgaaaacccccaaatcaaaggatccctttctcaagggaagttcgtggaactcgagctcggcgaggaacggcgacgattcgtgagtacccaagctaggggaagtcgtccgtgggtcttccttgcgtcatttgaggtaagaaacacaagatttacctcttgattcatgagttggggtttttggtgaatagtgacccacttttgatagagcttgagttagctttgggtccagttgaaacatgtgtttggaatgttgagaggatgtaggattagctcttagaagtggatttggtgaatgttgattccatggctcttgttgatgcatgtgttgttgttgggttgagttgcttagccattgttgaacatgctagagccttggcttgtgtttgtgatggccttgagaggctattgtgatgatggcttgtgaatgccaaaccttgttgaaccataggttagatgacttgtggtcttgagaaaggattgtgagtcctttcgtgtttgagcggttgtgaaccgtgatgtttgtgccttgtatggcttttgtgattaatacatgttgttgtatgtgccttggatagggcgtgacaccgcgggtgtcggtggcgtgggccacagagagagggaagaactgcgaagctcggctttgccaggtaagttctggacccttggggatgtttcccacttgcttgtgctctaccatactccgtgggagtagtggtttcattcatgactcatgcattgtttggatgttgcatgctcatacatgtatatatgtgcttgtagctgtgcttgatattgtattaannnnnnnnnnnnnnnnnnnnnnnnnnnnnnnnnnnnnnnnnnnnnnnnnnnnnnnnnnnnnnnnnnnnnnnnnnnnnnnnnnnnnnnnnnnnnnnnnnnnnnnnnnnnnnnnnnnnnnnnnnnnnnnnnnnnnnnnnnnnnnnnnnnnnnnnnnnnnnnnnnnnnnnnnnnnnnnnnnnnnnnnnnnnnnnnnnnnnnnnnnnnnnnnnnnnnnnnnnnnnnnnnnnnnnnnnnnnnnnnnnnnnnnnnnnnnnnnnnnnnnnnnnnnnnnnnnnnnnnnnnnnnnnnnnnnnnnnnnnnnnnnnnnnnnnnnnnnnnnnnnnnnnnnnnnnnnnnnnnnnnnnnnnnnnnnnnnnnnnnnnnnnnnnnnnnnnnnnnnnnnnnnnnnnnnnnnnnnnnnnnnnnnnnnnnnnnnnnnnnnnnnnnnnnnnnnnnnnnnnnnnnnnnnnnnnnnnnnnnnnnnnnnnnnnnnnnnnnnnnnnnnnnnnnnnnnnnnnnnnnnnnnnnnnnnnnnnnnnnnnnnnnnnnnnnnnnnnnnnnnnnnnnnnnnnnnnnnnnnnnnnnnnnnnnnnnnnnnnnnnnnnnnnnnnnnnnnnnnnnnnnnnnnnnnnnnnnnnnnnnnnnnnnnnnnnnnnnnnnnnnnnnnnnnnnnnnnnnnnnnnnnnnnnnnnnnnnnnnnnnnnnnnnnnnnnnnnnnnnnnnnnnnnnnnnnnnnnnnnnnnnnnnnnnnnnnnnnnnnnnnnnnnnnnnnnnnnnnnnnnnnnnnnnnnnnnnnnnnnnnnnnnnnnnnnnnnnnnnnnnnnnnnnnnnnnnnnnnnnnnnnntatctcaccccgtgtggggcttgtgtttttcaggtgatgcttctggcagaggggagcagtctcagggcgggaggccccagtagagacggtacctgcttggcctcgggcagcagaggatagcttggagctcggctcagctatgatggtgttttgtatgcttggagctcggctcagcatcttgtgttgttttgttgtacccctgttgagggaagacatgtgttgtacatgtgttttgagttgtatatgctcagtttatgtatgccctcgtgtgaggaaggatccgtgggatcagttagcactcggatgctattctttgtatgcacctcgggtgctggatgttgtataactcggttatgttatatatatatatgatgtggtttcctcctgtatgtttatatctttgagatatctgtttatctgcctatgttttgagtgtatgatctggttaagcaggggcatgagttatgcttgatgtgggttgtgattccatacatattgctatcgagaaaatatggttttcggttttatgcttccgcaataaactcgttttaaaaaggttttcattaactgtgattaagcgcaaatctgatgattatataatgataatacaccgggtatacacggggtgttacacatttgctttctctagcaagtggtgtctttcattagcctctgtggacgttttgtataatcaggaaatgccctgagtacttgtaattattcttttggttaatatgatttttaaatattttccaagaaaaaaaaaaagaaaaaggaagggatgaagtaaaagcacagaagaaaaaaacaaaacaaaacaaggtggtaacaagaaagaggtggtggtagtaactaggaagcatcatccacctaatggtgacacaagaaacaaaatgatgctgcccctattggttattagacattggaaactttatgaacccgtgttatgatggcttctattactactactactacataatacagtctgcagcagcacccaaaaaacaacactacatgcacagcacagggacttatcttggtttttccttttcactctgttttttgctttcactttatggggatatattaggtccatttccaactttttctgactttttcgtactaccccatcctaccaacataatgaaagcaaagaaaagaaaaaccacttatcaccacattcataggcgtttccagaattgatgcttgtggttgtggccatatacacaccccctactcagtatgatgacctatgatctattcccttggccttttccgttcacacacactgcacatttcatttcacacccatcacaaacaaaacaactttccctatagtgggattcctctactctttctcctccaacaatccattccctcaatagtgggggacacacacctcttgcgtcctgctttttttctcccatttaatgaatttccaaatactagtggttttcaatagaaaaaacaaaatcccccacaaaaaataataatttcaataaacaacattcacatttaataaaaaaattaaaaaatcatttaagttttgtgaatgccattaatttttattaataaaatgaaacttcctttccatttattctaataaaatcagcatgtgtccaaatatctagcaccaatcattttttttccttacaaataaacaccattttttttaaaaccaaaataataatattcaaaataaacaacattcactttgaatcagaattacaaatttctctgaaaaccattaattttatcaataaaacctcctttccgtttattccaataaaaaatcagtagttatcctaatttccaacacttcaccannnnnnnnnnnnnnnnnnnnnnnnnnnnnnnnnnnnnnnnnnnnnnnnnnnnnnnnnnnnnnnnnnnnnnnnnnnnnnnnnnnnnnnnnnnnnnnnnnnnnnnnnnnnnnnnnnnnnnnnnnnnnnnnnnnnnnnnnnnnnnnnnnnnnnnnnnnnnnnnnnnnnnnnnnnnnnnnnnnnnnnnnnnnnnnnnnnnnnnnnnnnnnnnnnnnnnnnnnnnnnnnnnnnnnnnnnnnnnnnnnnnnnnnnnnnnnnnnnnnnnnnnnnnnnnnnnnnnnnnnnnnnnnnnnnnnnnnnnnnnnnnnnnnnnnnnnnnnnnnnnnnnnnnnnnnnnnnnnnnnnnnnnnnnnnnnnnnnnnnnnnnnnnnnnnnnnnnnnnnnnnnnnnnnnnnnnnnnnnnnnnnnnnnnnnnnnnnnnnnnnnnnnnnnnnnnnnnnnnnnnnnnnnnnnnnnnnnnnnnnnnnnnnnnnnnnnnnnnnnnnnnnnnnnnnnnnnnnnnnnnnnnnnnnnnnnnnnnnnnnnnnnnnnnnnnnnnnnnnnnnnnnnnnnnnnnnnnnnnnnnnnnnnnnnnnnnnnnnnnnnnnnnnnnnnnnnnnnnnnnnnnnnnnnnnnnnnnnnnnnnnnnnnnnnnnnnnnnnnnnnnnnnnnnnnnnnnnnnnnnnnnnnnnnnnnnnnnnnnnnnnnnnnnnnnnnnnnnnnnnnnnnnnnnnnnnngaattctacattctactattttttttgtcctccttacactgtcctttggacaaaaaaagtaaactgtaactattttttccggtgttttaaaatggagtagtatatggaaaacgttaaaaaaagaaaagaaaaaaaaactcctaagagtaattaacatgaacactggcattaatgccacattgacaaagagggcaattgtgtacggcggacccacacattgtgcacagacacagatgcctacatggcaacaacaacactatcgattctcttaccccacactgattacacatcctcttccccaaaacgcccttgtttcgctcttttccgtttccgtttccgccgcaaacctcctcctcctcgcggtggtggtggtggttgttgttgctcgcgcaactcgattccgccgcttcggcgtggtggttgtggttataatcttcgctaacgtgcgccagaacttgttctagattgttccgaagattattcgcggtggcttcgtttgtttgcgctagttctttccaaatctgattctccacgcagatgctcttcactcgttcttgcagaacccaattcagcttccccacgcgctgaatctcttcatctttctccttcagtttcttcgccacggcttcttgaatcgccgtcatcaacattctcgattgcctcactcgctgctccgccatctccattctcactttctccgtctaaaaaaatcaataaaaatattttaattttaaatcacacgatttcattttatttttataatttttttataggattggaaaacacttacgtgttgtacgatgaagcggtcgatctcggattgttggttctggatatggaagagaagctcttgatcgagaatggacggtggtgatgatgatgagagtttgttcttctgcggaagtggtagaagcgcgtttagtacggtggtggtgatggagtctctggagcgttttctcgtcggagcggtggtggtgacgtggcaggtgaggccactatcggattggtggagaaaaggtaacgccgttgactgaagaagaggcgcagcagtagcagcagcgccttccgtttgctgtgcggtgtagaagccaagattgggtttcatcatttctctgttgaaacggattttcagattaaacggttcgagatatgttgaatacttaaaacgaagaaagaaagagggggaatggtttttgtagattgattgtgttacctggcggttagtaactgcgaggggaagacattcatgttgtgcggatgagcctcaactgccatgatgagagatttgttgttgttgttgtttttggtttggttgttactttcttgtgagtgatggtgagtttgttgcggttttctgagtttttcgtttttcgttttcgttttcgttttctcgcaatgcaatgaatgaaagccagagcatgaagagaaggagggagagaaatatagagaatgacgaggcatgcaaatgaggtggcgactactagccttcaatgaatgtgccccgtttatttatttaaggctttggctcttatgccattcctagactgagagagagagagaacgacaaagtcaaatccaaaaacccattttctagtcttctagatacaccaaaatctaagcatattgttttattttatttatttttttcaattaattaattgccttttgctttttcatttattgcaaagaccatttaattgaattttaatattaaatataattctgcataataataaaagacgctgtaacgcatgtgagaatggggaatcccttttttgagttttaactttttaacctttttcttctttctgtcgttttggaatttgctttgttgtataaatttgagttttaattaatgctaacaggcaacttaaaaagaattatataaaaaaatataaatactaaacaaaatcttatatttaaagacaagaagaataacaattttagaataatgctgtggcctcagtcacccaaagaggcatacgtatggcacaattaagttaatcgtggaatcgtaatatacaatccactttacgaaaccatattatcttgacttttagcggcagttaaagttatctatgaattaatcaatttaattttggatctttatttctatctttattattattttccttgtgttcaaggtaagtaattttggctgtttttttagtggtgtgaatctgaatgacgtggtggtgtgtaaaactaaccatgtgaatgtgtacatatgttcaaaatctaactaaattgaacctaaaatcaaagaatcattaaaaaaaataccataaaagtttttggttattagtttggtttgatttcttcagttttcaaatatataattcgattttatttgtaatttaatatactaaaactgaatcaaatcaaatcgtatagcaagatatccttataaattatctttgttattggatatttattttctaaaattttatgaatagaaacaagtattatgaatattattttactatttttaaaaatttgataattaaacttgaaagaaaatattatatgttattgttacttttaagttgaatgtctattattgaaatattatacaatttgaaaacaattattattttatttaaagtttaattttttaaacttatatcgttaattttaatcattgatcttattattcaagttcgtccaaataataataaaaaattaaacattttttaatatttattatcaaaaattttaaatcgtaaaaatcaaactgaatcaaaatcaaacagctcaaaattagtttgattttcataaataatttaagataaaataaactacattacacttagttttacatatatagcataactggggtagagacggggtggggaccacagtgacccttgaggcatgtaaagatgagatccatttttgtcgttggggagcggtttcctcactatgcggttgccttgtttacaaccgagctatgtgcatgtatgtacggccaaatttgtttggtcatgctgtgagagttattatatggtggggtgcaggtccacagtaatcttgatgagcgtgctagcggtcaacattcaacaatcaatactttttgatcaattttcttactaaaaaaaaacaaagattattgtgcaaattagtagcagtcaagatatttgaatggaccacaatattattggtcaacatttttaattgttagagtaactaacgttcttattaatttattaaacttttaattagtaagttttgtattattcaataaaaagtattttaatttcttaaaaggaaactagtctttattaagttatggtacaatactcaattgcaatattaattgcatgaaaaatattttctagattaaacaagtcaattcagtattttttatattttaaaaaggattagtatttaactactattaatcagtaacaaatatttttaatgctattttctgtaacttgtatttattgttatttacaatcatatggaaaatagaatttaatattattatatatttttacaatgtcatctaattatattcttatatatgataatttttataataattaattttgaaatcaaatttttctcaataaagtttgaaatcacatttaaatataggtttttattaattgaaatataaaaagttaagggtaaattataattttggtcctcctaatttttttaattcatgattttagttttcttgattcttaattgtaatatttggcctcctaattttataggttggtgattttggtccaccttatcaattattacctaataattgtaattattagagatattaaattaattataaataaaataaaattattaatcattaaaattttaataaaagactattaaccctaatgtggcaatatggtgttgttggtggtgaatttgcgtgcaacaatagaggtggaagaaatgtttgcaaagaagaggagcacattattatggaaaattagaattattaatattttttattgattttaataattaatttgtaactaacttaataactcaattaattgaaattatttgttaataacctatcaaaagaatcaaaatcatcaatttataaaacttggggactaaaaccgtggacttgagaaattaggataacccaaatggtaatttagccaaaaattaaaagtgatagaatataaaaattaaactctaaaattattgtgtactagcttagtatctcgtgtctaacacacgtattaaaatatacatattttataataattaataggagtattttttatattatttttattatttatatattattaattatttagtttaaattttttaaaatgtgtataatagatatgtcaataaatatttaaatataattttatatacacacatgctcgaaaaaattgttatttagggaggcacctctttgaaattaatctaagtggtgttcatgtttattatgaaagataataatcttgaacaaatctcaagaatcaactcttgatatcaattgaaaatataatgaacactcttcaaataaccacgagaggggatgaattgattaataccaacttttaaaaaattttcttaaaaattatttgcggaattaaaacaacactactagaaaaataggttttaacatcggctgtttaacatcggttactgataggaccgatgttaacaaaaacacggtggcaattttgtaaataagtggactaatttaacatcggttttaaagatttttcacaaaaccgatgttaaccttgaacggttaacatcggttttcaatattttttagcataaccgatgttaaagatgaaacgttaacatcggttgtcatgattttacgtcaaaccgatgttaacttagaaatgttaacatcggttgtctagattttaagtaaaaccgatgttaatgatgaaatgttaacatcggttttcatgttttttaagtataaccgatattaaaataatatattaacatcggttctggtatgggaaccgatgttgtgggtatgagatacgacgtcgcgacgattaaacttcagtatcgcgccttaaaagcctttgtcttttccgaaaagcttcgtatctcttaactctcgcgcccatttctatgaaaggctccctcgttgtcgtcactcatcactgaagcgctatcacctcttcttctcctttgtgcgttgtcgagacccccactgaagcgctatcacaccatctcctcttctccagttctccttcaagccttgtcgacaaggctctgttctccgttgtgccttcgcccatatcacggtccacatctcttcttctccttccgcgcgctgtgaccaccattgtcgggcgttgttccgcttgctgaggtcgcggtcccccaaggttagtggttcgcattgttggtgttagctnnnnnnnnnnnnnnnnnnnnnnnnnnnnnnnnnnnnnnnnnnnnnnnnnnnnnnnnnnnnnnnnnnnnnnnnnnnnnnnnnnnnnnnnnnnnnnnnnnnnnnnnnnnnnnnnnnnnnnnnnnnnnnnnnnnnnnnnnnnnnnnnnnnnnnnnnnnnnnnnnnnnnnnnnnnnnnnnnnnnnnnnnnnnnnnnnnnnnnnnnnnnnnnnnnnnnnnnnnnnnnnnnnnnnnnnnnnnnnnnnnnnnnnnnnnnnnnnnnnnnnnnnnnnnnnnnnnnnnnnnnnnnnnnnnnnnnnnnnnnnnnnnnnnnnnnnnnnnnnnnnnnnnnnnnnnnnnnnnnnnnnnnnnnnnnnnnnnnnnnnnnnnnnnnnnnnnnnnnnnnnnnnnnnnnnnnnnnnnnnnnnnatttcaatacatatagaaagcaggtcagacaaatattacatatgaaccttttacatatacagaacagatctggcaaaaacaaatctagatttatactagaaagtagatcagacaaaaactaaatctaaggtgtacttagggagcatctaattctattagaccttagatattaaatttcttttaatttgtcttcactatcatgattctttagccaaagaaatcttcttgaagcaccaacatgatctcaggctcgaaatccttttgaaaggatgacagttcagacttcttctagattctctaatccttttgtaacaaggcttaggcattatgtctgaataagagagatgccaaaggcagagacggctagtgatgcaaattcagaaggctatttatcctctatttataggcagaatcagactccataagtctttccaccgtccgcattttcaagagttataactgttggaacaagttcagaggtcatgtattcagttacctcattaatagactgtttatgatacacacaaaatgcttcaaattctacccaagagtcagagatgccacaatagattaggattaggctgttttattatgtcctgaatgggctaaacaattgtataaacattaggttagcaaatattttttatttacatattgacattattcaattttatttgttattcaaattttaaatttttgaattgtattatcaaattggctggttggtgtatggctctggtttttcatttacaggttgaagaactgcactaattaaaaaaacagaaacaatattaaaaaaaaaattgaaaacaacatcgattttcttatgaaaaccgatgttgttatcaagaaacaacatcggtttgcttagcaaaaccgatgttgttatattccttaacatcggttctacaacaaaaaccgatgttgtcaaaccatcgtttactcttttacgcgttttcatgtatgacatgtccacatcggttattgatggcaaaccgatgtgctttacgtttgttaacatcggttttcataaccgatgttaaattctcaactttcaacgtcgcctgattcaacatcgggcgagaaccgatgttaaatggctcagataatcgatgtggaaagctgcttttctagtagtgcaaggatcgtatcactcaatcacccataatcaaatacagatttttgtttcaatctaatatgaccttgaactgcatgtaatgaatgaaatatctcttattgattgccaattgatttccaaccaagaataatgaaagatatactgataaagatacaatcacacagcaatttatattggttcacctcacaaacatggagactacattcagtgtcttccaaccaacactatgttagagttttgactatttcaaatcattcttgtacaagcacaacaagtgactatctctatcaacaagtgactatttctatcatgttggtatgtcctgcatatctatttattactagttatctcaatttcatcctaagtgacattaaatggatagatggatttccctagttaaattacttaatttcccagattataacgttgaaaataattgaaaataaaactaaaatttacatcaatgtaattaattagtgtgttaagaggatattaagtaataattcaatacatcaattaaatgtaataaaaataaattttaatttataagtaaataaaatggttgaacatcacgtcagcacctattgatctttctctacacacttttaatttgtccaatattgtttcaccatataatctttaacacctgcccacaaataatagtttctcttttcatttattttcttttaatggatttcatggtgacaggaggaagtcttggtggtgatactgtgcaagttttaggtaaaaaatgcaaaagtggtgggaaggagaaggaacaaacagtcttttgtgtgttggatcaaaggacagtggaatcgagaagatgacagataaggctatttagctccataatttttgtattttctataggctttagtttgaataattattgtgaatatacattttttgtactataagattttaacttggttttaatttggtaaaactgaagcaacattatggggttggtgaaccaatatggtaaaaaaaaatggacgaaaatagctgagaagtgggaaggaaacaaaatggttttaatttagcgaatgttcacatttaagatggttattacgaaaaatcgtcttaaatcagattttttttaataaaatgacactattctaagatggttgttacgaataaccgtcttataattttcacaatctaagacagttgttacgaaaaaacatcttagataagatttttttttttaaatgacactattctaagacggttcttaataataactatcttagtaagtgagcattctaagatggttattactaagaaccatcttacaatagtgtcatttaaaaaaaatctgatttaaaatgatttttcataacaaccttcttagaaacttcagctacgaagacgattttataaccgtcgttgtaagtgacgaccttcaacgacgttcgctacaaagacggtcttgaaaccatcgtggaaacctcttcttatagtagtgagtggtatgacatttgtgggattggaatgctgtgtgttgaggtgcaaggggatttagtccatattctttactatggaaccctagtttatgttttagttccatgcgttttgtatcagtagactgatatggtgttgttgcatctttgtgtgtgcatgaaaggttaggtaacaattatcatgcatgattatctcatgtgtttttttatttttgttttatcattttgattctattttatacttttgaatcctatagaagtacattttgtgcttttaaagggttttttaaataaatttgattggccattaaaataattgtcaaacttttaaataacttaatgactaatatatgtaataattatcatatatataatttttaaaataataatatattttttagtagttttttatgactaatatatgtcataattgattaattatatatttttttaaagtattataaacataaatccataataataaatatttgtttaaggtgtttaaggtaattgtattaatatatataattaatataataatttatagtcatcataagtattatgaaataattaggataatagtatcatttaatccagagattatagacaaaaattaaggtaatagtagtaattgataatttatatttgatttaaatatatttttagttttttaaatttggataattttttttagtccttaaaaaataatgtttttattagttccttaaatttttgaaaaattacttttggtctctcttattttttgtgttaatggtgtaataatttgtgagacaatttttcaccattagaaatatttttaatttaatttatttaaaataatttgtaacaatttaaaagnnnnnnnnnnnnnnnnnnnnnnnnnnnnnnnnnnnnnnnnnnnnnnnnnnnnnnnnnnnnnnnnnnnnnnnnnnnnnnnnnnnnnnnnnnnnnnnnnnnnnnnnnnnnnnnnnnnnnnnnnnnnnnnnnnnnnnnnnnnnnnnnnnnnnnnnnnnnnnnnnnnnnnnnnnnnnnnnnnnnnnnnnnnnnnnnnnnnnnnnnnnnnnnnnnnnnnnnnnnnnnnnnnnnnnnnnnnnnnnnnnnnnnnnnnnnnnnnnnnnnnnnnnnnnnnnnnnnnnnnnnnnnnnnnnnnnnnnnnnnnnnnnnnnnnnnnnnnnnnnnnnnnnnnnnnnnnnnnnnnnnnnnnnnnnnnnnnnnnnnnnnnnnnnnnnnnnnnnnnnnnnnnnnnnnnnnnnnnnnnnnnnnnnnnnnnnnnnnnnnnnnnnnnnnnnnnnnnnnnnnnnnnnnnnnnnnnnnnnnnnnnnnnnnnnnnnnnnnnnnnnnnnnnnnnnnnnnnnnnnnnnnnnnnnnnnnnnnnnnnnnnnnnnnnnnnnnnnnnnnnnnnnnnnnnnnnnnnnnnnnnnnnnnnnnnnnnnnnnnnnnnnnnnnnnnnnnnnnnnnnnnnnnnnnnnnnnnnnnnnnnnnnnnnnnnnnnnnnnnnnnnnnnnnnnnnnnnnnnnnnnnnnnnnnnnnnnnnnnnnnnnnnnnnnnnnnnnnnnnnnnnnnnnnnnnnnnnnnnnnnnnnnnnnnnnnnnnnnnnnnnnnnnnnnnnnnnnnnnnnnnnnnnnnnnnnnnnnnnnnnnnnnnnnnnnnnnnnnnnnnnnnnnnnnnnnnnnnnnnnnnnnnnnnnnnnnnnnnnnnnnnnnnnnnnnnnnnnnnnnnnnnnnnnnnnnnnnnnnnnnnnnnnnnnnnnnnnnnnnnnnnnnnnnnnnnnnnnnnnnnnnnnnnnnnnnnnnnnnnnnnnnnnnnnnnnnnnnnnnnnnnnnnnnnnnnnnnnnnnnnnnnnnnnnnnnnnnnnnnnnnnnnnnnnnnnnnnnnnnnnnnnnnnnnnnnnnnnnnnnnnnnnnnnnnnnnnnnnnnnnnnnnnnnnnnnnnnnnnnnnnnnnnnnnnnnnnnnnnnnnnnnnnnnnnnnnnnnnnnnnnnnnnnnnnnnnnnnnnnnnnnnnnnnnnnnnnnnnnnnngcatataaaataaattagcctaaatcttttatcaaaatcctatttaattagaaagactaggtcttagactctttgaaaaacttgttagacttatcagacccatctattaaaaacataaataaatatttattgttactattaccattataaatttatcatattgtattaaatcacatttatattgtctttttacatgttaaaaatattcatctacctaaagagtcaagctaaaacttataattaattttattgaaatatacatttgtcttatttaaaagttttaaataagtttaatgaatactatattaaatcttaaaaatacgttaatatggtataaacaagttaaattcaattctcataaatctcaatatacattttttatatcattattttagttttgaattatcacaaagtagaatttaaggggttgtttggttgtgagaaggggaaaaaagagaataggtgagaagaaaaataagtaagaaataaggtgaaagtaaaggtgatttggttaaagagaaacaaatgagagtaaaacgaaatttttttgaattaaagttagttggtaactttttgatttatttttccaaaaggttaggctactatcttagcaaaattcaattggcctcccgtatgccttgttcgtaatggatgtgttgaggttgtgcacattaacagggaagccaattcttctgctgactgagctgctaaatttggccatcaaagaagttggacctttggcataaaaaaaaataaataaataaattaaaaaaaaaaaaagaagagagagagcacgccctagtcagaaggaaagatagagagaaaaaaacattatgggtccgacattactccaattaataaggaggtcaattagctgtgaatgttgtgaatgatactgtattcaatttctatggagtaaaaaagtatttaattaaaaattctttaataaataaataagtcagattagtcatctacttttaatcaaggttaggctcgagttaagaaagtttagcccggtctaacctatctttaacccttaattaatgtgtgcttgattatcttaaaaaattcagtttattaaaaaatattaaccatttggttatattttatcatcttttaatttgagaaaaaaagtttacataagtagttatgatttttgttctattttatttttacaattttaataatactacattttgatactttattttattttttacttaattgtaatttttatcattaaacttttattattttgctaatttatcacttaagttttattttttttgaattttattacactcaactttcataattttgcaaattttactatctaattttcaacatttcacaaattttaccatctaaattttagacttttgtgcattttaccatcaagttaataacaaaatgatgtaaaaagacactttttacatcgattgtaattataatcaatatcaaaagttaaaatcatccatttttgtaccacagatagtaaaatatgcaaaaattaaaaattaagtgataaattttacaattaagcctttattttttttaggttcaatttaatttttttattttaaaagttttaatttgatccttaatttatttataaggctcagtttgatcgttttatttttaaaagcttctatggagttatttattttttaaaattgatttaatttgatctcatttaaaatcaaattttacctcattttttagaaaattaaagaaaactgggactaaatttaactcattttaagaaattaaggacttaaataaacattttaacaataaaggaatcaaattaaacttaataaataaatcaaaggattaaatttaatttttaaaataaaattatcaaactaaatctaaaaattaaattaaaagaaaaacataacaattaaaccttttaatataacataaaaattatggtttctgtcgtctatatatgaaaagtaaaatttcactaaacctatttgattgaacgagtgatcattaattttaagaagacagaacccatattcccaattaattaattgatacaactttttctttcgaaatcccgtcccaaaacatgtgcaggggtaattgatgtctaaaataagtaaagttggttcattagatcgatacacatagggagttcataagtttatgtagcgggtcaacagtgtctcatcctgctacttttgtgtgaataataaaagtggtgatcaatcaccttgcttaacttgctaaaataatggagaatcagaatctataatataaaaccaggtatatatagcattcaaatatatacatgcaacctcacatgcatattcagtttacagcatttcctccataatatgatggatgtgcccgacacattgctaatgattttgaataagataatgagggagggtgaacaaaacctttgaatggtgctcaataaagatctgtctcttagttgtcacagttatgcatgtccgtacgtaattttacccactaattcccatcataacacctcagtcatttatatatacttaatgaacaattaagcaagtaattaaaaatatataattgacgagtataattaaattgataacacattaaatttattaaaaaagatctgacccttactgaaaattctcttagagaggggtgtaaaatttaggtgtgattatatctcgaatggaatgattatgattgttgttaaaaaaaattagaatatataactatattttttataaaaatatataaatatacttaagctcattgcctgtgcactatttacgttaattagtccatgtgagtttatttatttattacttttagattttcaactttaatatacagctcttcattaatccaagaaagtttggcgcttattattaaaaactctagtgcatgatccactcctacttttccttttgccttagggaacaggttttgtgatgtgctacgatttttttaaagtgcaatttattgagatgccaatgtttgtctttttacatgaaaatgtgctagacataaacctccaggcaatgggggcagaatcacttttgtgtaaataaaaaagaaaagcgtagaataaattcacgttataatgactgtaatttaaaacgaattaagttttatattacatatagtaataggcactatagtagcatcttggatcccaatcgcttccactcaaccccacctttttgtttagtaattaatatgataggttacatcagttacctctaaaagcagctaataataaacttaacgtcttcattaccagtatgagaactttcaaggttataggattttactacaaaagcgtgtgtaggcgaattaactaagtccatagctatagcatcatttgcatgcattaatttgaacgtgtatattcaagctagctaactatgggttggcagaaagcttaaaatttgagaaacgtgtgatctagtttacacatctagatggttgatatgaaagtcgaattttccatttctccatgcttaatcaaagaaacaaaatggtcaaaaaaaatcaaattaaaaaattgactaaaagaggaaaatgagtgttggctgacattagttttaattaagcattattcttgaaaaggacattttagtagataaaggatttgaaaatttgaagctggtattttcaaacacctaattaacatgcatgcattgttctaattgccttcccggatcagccaatcaatttccttatgtccataatataaattatttaaaaattaaaacaattataaattaaggagctgaatgtcaaactacttggtattcgatcatacactttgaatcattatgaaagaaattaatcagggaagtagtcaagtagacttctcatatatgtcatgcttcatggctgtacatcattttatagtccaattgctaagttggtcaaatttgcaacgttttaggcgagaatatagagatcaataacacacacacatataaatatttttattatattacatatgaataaattagagataaaaatttctaaaattgaaggaatatatatatatatatatatataagtcaaaagacttaaacgtcaaaaataacttttatcaaaatttaaatttaaatataaattaagattattcaagactgtaataatattaaacttcaatatatctaaaaaagaaatgtatcttcaaaataatatattgtattaatatttgaaataaaaaataaaaataatttaagtaataatatttgaaaataataaaacttataaataaaaacctacaagttcaataatgtaaagggagttatattaaggaagaaaataaatcttataaggatataaaaatcaatacatttcaattttacaaagaaaaatatatattaaaatttacagaattaaaatttaaatattttttattgataaatattaattgttgaaattattattaaaaaatagattgaactcaccatttttttttaattttttccttaatcatctatcaattttatatttctatatttaaattcaaatgtttttaatttataaaaacaaaaaacatattttaatttaggaaatgactaattttaaatttagttattaggcataatcgacacagtttctagtatgctctcgttaggtctatcagatgtaacaaaagtctaaatatgtgattttttatttttctggtatagaatgcaccggccttcttagaatatgagtacggttaacctagattttcacgtaagatatttcgtagagaaaggtatccattgaattgtcactttcacggaatcaaacaaagaatacctctcccatgcaactgatgcaaggtcttgcatcaaaccttcaactaaaatggagcctacatatcatattcttcacagaaaatttattattattttttgtatgatatattgcaaaaaaataaaagtttgataacgaataataatattgacaggtaggttgaataaaaaggagcagtcaccccaccttgtccgtagcaatctaacattttccatttttaatttccctcacaaacacgcataatatgaagaagaaaaaggtgtataagataaaagcgaaaaataaaagtagtggccaacaaaaaaggaaacataaatattgacagatggattcctacatccacagctcccaataactttctctttctctcttttccatgtccttctttattattgcttgcttccattatcaaattatatcatagattccttcaatactatacttatattaacctctaattaccttggaagaaaacaaaggtatcttaaacaatgaaagaacttgttttcttttcatttaattttaaaagaaattaaagtataaaacaaagcataaaaaagttaatgtacttatataattaggtaagatgttgtaaggttgatttgctatgggtatttcttgtatacatattttttgtcgataaaaaaaacttacataattaggtaaaatattataagattaatttgatagtgacaaaaaatgaaaaaaattgtaaatttaaatctctcactaaaaaaatgataattaacctctaacatatgtacataaaaataactaattatacaattaggccggtatgatagatatacttgtgcaaaattaaaatgataattatggaaacacttttttatttaattttgcaatctaacagatgtacatatgctattcagcttagcccaaggtaagccaatcttggtgtgctggacaaatgaagataagaccaaatatttaaatgatatgtatataaaaaaggaacaaattactaaaatttatgtggaagtttcaatttgtgggcttgaaacgtgtgtccatggatgagatgcgtttttagtcgctgaaggaaacattgtcctttataatgaaaggtccaaaacctaactgtagaggcaatgtttggttgcatatgtttattacatgtgggcttgaaaactcacatacatggattcgacacaaaatgccaagtgtctctaaattaatatagatgtactttactttcgatgtctatatcatccttatggaggaaagatccatacaacttttccaattgaccttaagaagtataaaggttctccatagtagcctctaataacaattattatttctataattatgcagttttatctttcaaggagcatcaactgccacgaattaaccttctgtgtttcgctttatcttcacacaatcacacacaaatatatatggaatgaaaacttttctaattataaaaaaattagaaacataaatacacgtcattaagtaatattagaattcgttgaaattaagtgaaaaataaaagatttttttcttctgaacaaaatacactactttttaagtacttatttaatcattaattttttatattttaataataaattataatttctcatttctatatctatatatctctataaattatgatgacgatgagaggggatggaaactggccacagaatgctcatgtgtttggttatactcaattactaataaagatttttcgtactttgttatttctctcctcccccgttcgtgtgagtgttcactaataaaaaagtaaagaaaatgatatcgttgtccaataggttaagtaagggataatatttaatttaatatataacccctattgtaattatcactgataatataatgttatctttttagccagcacggggtgaagaggatcactttatttggtgcaattttggagtggatttgcggtgggcagctaaatgatagttaaatgtaacctaatgaaaaagtgtcatcgcttttgtagctaaagaaggagagaagagggtccaaaaccctcaaagatatagacttttgaataattaattaattagtttgggtgattattgaccaagtcgaaaaggaaactgatcttattattttaatcgcaatgctaatcaagattaactgatttgaccccattgtgtcttattcattgacactgcctcatacagcattgatatataactttaatataaataaaggtaatgctatattagtgcaaatcgatgttttaggtacctaaattttcattgctttcacatgatcgaacctgaccatgttaacttttatgataccatcgcaagcaattaagctgttcacgattggatgttcattttaaaaacaaaaatcaggaaaatccgatgtatgttcttttgcacccagaataataaaacaaagccaagaataggttaagaatttcattagagagaagagaaacaccaacatgtgtatttaatttctttttgtcatcgataattcgctaggtctcattaatagcctccttaattaattgatgccttgtctttttcaagaaatgaaaaaaaaaagaacataaggtcacattaccaataataacatattttgttaattaattagcaaaatgaattaaataatctttgaaagatgattaattatataataattttttaacacttatgagaaataaaacaagtaatcatttatttaattgaatatttatgttttatgtcgtattttcttttcatgtaaagaattcttaaagataaaaatccctagtacacatctacatctctctctctatatacannnnnnnnnnnnnnnnnnnnnnnnnnnnnnnnnnnnnnnnnnnnnnnnnnnnnnnnnnnnnnnnnnnnnnnnattattgaatgaaaacttttgtcaaacgtgaagcttttaggtattttccccctttatactaataagaccatgctaaatttagaaagttttactattcattatatagtgtattttcttttatattttttcttatatgaatttttcttcttatacccctattcttatacacatttttctttctaacgtacttattaacattattgttttacaaaatacttaaaagaattagaaagggtacttttaaataaatccattttaattataaataatttaaataaatttccttaaacatatatctattttttgttattgactatattaataatgatatatattatatgattttaaaatttatataaaatcaaaatggtaagctattgtaaaattttatgaatatctatatcatacataattaacattgaactcaactgtataataattttcactatataatacaaaatatgtaatatttttcacaatttaaataaatgatatttgaacttgtgtatcactataattacatattatattacatagtttatcatttcacatttcaaaattacaaaaatattaacattgacataatttaatttttttaatttataaacataatttatcatttctctattacccccaaatgtatgtccaatttatttaaacataattaattatgcattttattttcttgaaggattttctaaatcgacaatgatgaaaaccatgattaaaatcaatcaacaattgatttactggaggcttctcataaaaatacgacattaattatttattaagcaattcaattccaacttaattagtcgcactacaagaacaagaatgactagacatgtgaaaaccaatttgtcgatttattatcatctctggatcgatcttttcaaggcccactaatcaacatttgtccttgacgcatgtacataggcattatagctacaattcaaaatagccgccataaataattaaataaatagaaacctcttgtgatataattgcattatatatatatatatatatatatatatatatatatacaaggaatagtatatatgtatatgtcgatcataactgtcatctataaatgtgaaatgaatatatgtgccatgcatagggttgaaattgcaaagacaaaatgatgtatcatatcttagcagtttccatcgaagaaagtaagagaaaaattcaaataaaaccacaattaagttggccaagacaatatggcaaatgagaacaataaattcgaaccaaactgatggagatttggtgcgtcactttcttggaatttctcttttggaggcagccggatgagcacgatagcgaggaatttgtgcgtattataaaatagttttgaaagaaaattataataataatcttagtgttgtcaagagtcacgtacattagtgaaactattatattcgaccccacaaaggaagagggtgtggaccaatctcaacatcaatgttaatgttgttgttgtaatgacgtatagatgggatgattgttttctttgtctccattaggagtacttggttggtttttagtgacgaaattgatatgattaaatatacgtttttgttctgtttaacacaagttgaataatgcaccccacaccctgatttttccaagagttggcggaatagaactactattaatattataggtctttttcatgcactaatcacatgggctaaggtaattttttttaaaataatgcatcatttattaggttaattaatttgtaccattgtatcaactttttgtttatggtatctaatatcactactactgtatatgggtaacgtgttgagggcaaacatatggcatatattggcatgcatgcgtcagaaagttaacattagtaagtttcataaaataatgaaagtaggactatataggacgtactgaatcatcacatgcgagacattttctttttacatatggtaaagtgcaaagggtcacgcctctttaatatttataggtgatctttcacttgtctaagttatactgtgcagaatacgactatttaattattaagattgcgattgtcattgattggacaatgcacataaccatatgtattcgttcttgattacattatctgatgttgaaagtgacagtaataaaacgtttttttaatcaacagtaacaaaacatactgaaaattataaaaatatccatatatataatccacaagcttcgtcattttgctaatacttttaattataaatggttttgctcctattattctgaagtgtcactttagaatttttgtttggtacagacttagaataatttacaagaataataaaaataacaattatcttaattatataattaagaggaaaaagtgattttacgactaaattctcctctttgttaaaataacacaattgttaatagttcaactctataaagaaaagaaaataacttatctagtnnnnnnnnnnnnnnnnnnnnnnnnnnnnnnnnnnnnnnnnnnnnnnnnnnnnnnnnnnnnnnnnnnnnnnnnnnnnnnnnnnnnnnnnnnnnnnnnnnnnnnnnnnnnnnnnnnnnnnnnnnnnnnnnnnnnnnnnnnnnnnnnnnnnnnnnnnnnnnnnnnnnnnnnnnnnnnnnnnnnnnnnnnnnnnnnnnnnnnnnnnnnnnnnnnnnnnnnnnnnnnnnnnnnnnnnnnnnnnnnnnnnnnnnnnnnnnnnnnnnnnnnnnnnnnnnnnnnnnnnnnnnnnnnnnnnnnnnnnnnnnnnnnnnnnnnnnnnnnnnnnnnnnnnnnnnnnnnnnnnnnnnnnnnnnnnnnnnnnnnnnnnnnnnnnnnnnnnnnnnnnnnnnnnnnnnnnnnnnnnnnnnnnnnnnnnnnnnnnnnnnnnnnnnnnnnnnnnnnnnnnnnnnnnnnnnnnnnnnnnnnnnnnnnnnnnnnnnnnnnnnnnnnnnnnnnnnnnnnnnnnnnnnnnnnnnnnnnnnnnnnnnnnnnnnnnnnnnnnnnnnnnnnnnnnnnnnnnnnnnnnnnnnnnnnnnnnnnnnnnnnnnnnnnnnnnnnnnnnnnnnnnnnnnnnnnnnnnnnnnnnnnnnnnnnnnnnnnnnnnnnnnnnnnnnnnnnnnnnnnnnnnnnnnnnnnnnnnnnnnnnnnnnnnnnnnnnnnnnnnnnnnnnnnnnnnnnnnnnnnnnnnnnnnnnnnnnnnnnnnnnnnnnnnnnnnnnnnnnnnnnnnnnnnnnnnnnnnnnnnnnnnnnnnnnnnnnnnnnnnnnnnnnnnnnnnnnnnnnnnnnnnnnnnnnnnnnnnnnnnnnnnnnnnnnnnnnnnnnnnnnnnnnnnnnnnnnnnnnnnnnnnnnnnnnnnnnnnnnnnnnnnnnnnnnnnnnnnnnnnnnnnnnnnnnnnnnnnnnnnnnngtaaaatatatcttgtaaatttttatggtgtccggtcctccaccagaaaaaaaaaatgaaattagtttggttgtttgttggatatttataaccgtgaaagaaaagccaattcttatttcttttatcaaattgtctcatgataatgtttaaataacctaattacaaacagacaatcaccaatgacaaataaaattcaaatcaaactaaagaatttgaaaaacaccggaaataataagtttgaatatttgataattttattatatatcatcatcaatctgtgtcagtcaactttgctcctccaagttatacctttaattttatcgagcaattgattagttatatggcttgtttgcgcaacactaatttccatcttaagccaaagataaatgtcataacaaaaaacgttgctaattaatgaaccagtcatttcaggaaaacaatgaccagctaaacagttcaaataggggcaagacatattggcatgtaattgtgtcattttcagcaagtgtgcctgtcattataagctgatttagaccatttagcaatgcgatcatttattcatataataaatttatattttttattactttttaaaccatattattaatataaaatatatatttattttatcaataattaatctttactgaaagtctaattaattatttttaatcatgtcttcactcaagcaatatcttagattttatttaaaatgactaaacttagttctatttaaatcagtgagttattaatttttgttttattatttcatttcttttgtgttttgtatatttattttaaattttttttctgcaggtactatttgtcttcaatgttcctgacctatctcgcaaatcgttatcattatatataatgtggttctcatctataacacattctatctaactttagattcaaggaatcaagataacagttttttgaaagaggaattaagataacattgggattaaaaccttcgttaggtgaaacatcgatgggttagacaatgacaatgacaaataattaatcatctctcagtctaatccattgcgccttataaaatgccgcctgaattgatgccccttttttctacgtaattgtttgttaattaatttgatagttatattataactatgcatggtcatcgaataattaattgataattctattatttgctgctaaccacccgtcagcgacgatccttaattttcgttgtttccttcttggcctgacttgctgcgatgcaacctacctacgtgaacaaaacatattgacttccttaaaattgttttaatttatggaatcatgatgtcataaagtgttaatagtgaaaattgcatatactcctgaaaaggaatattttcaatatagtaaaaaaaatcactaaatacttttattaacaaagaaatgtttaaaagatgagatataatccgtttttcgattatgaattctttttttattaaacaaacaagttaatattttcaacttataaaaaattatctaatatttaatgcgaattacaattataattttgataaatatatcgaattttgttactatagtataatagttcataggattattaatatatatattttttataaaagtgtttttgatttagattgatttttaaatgattttgataataataagtagggattagaaaagtaaagttttgaaaaaaatgttgattggaaagagtaaatgatttagaaatgtgcagtaaaataaatacacatgaattcataaaatatgataattcaatttttgatggtaggtattattagtgtttaaggaattaagttattgtgtttcaacccccgaaaattgaccgtaaataattttatttatagacttctaatactaatgatcgaattatatgattttgacacatatacaaaaatattcataaatacattgatttgatactgataattgtcttcacataatttcattgcatccacaccaactagtacttcaatttgtcaaaaaatactttattctctaacacttttcaatcatacgtgcatgaatgaaattatcaaagtaaagagtctcaatcaaaattattcactttaattacacaatcccgtttctcaaacttttacccatatttcaatcatttttgaagggattcttttactcatctcaagtcaaatatatcaaaatttaatttcaatgacttaatcaaattttacataataataaaacaaacacataaataatataagctaatgtgtacattattatatttttattatattctttccccaatgtttgggtggacacgtacatacggaggttcatatttgaacggggagttccgcttaatcaaagggttgtcttactgtttatggtacaaatttcgtttaagtaaccagatttaaattttattatgtttcccctgttgattctttctaatcaaacacaaacaacttcattagccttttaaaggagggacacaattggtggttgggctggacgaagaagatatatagatatggaaaaataatacaaataaggaacttgctatttacaacccgatttctgattagtacatccccaaatggccccttttgtaattttaattgtccattgtatcctttttccctaaagagatacacccattggaactcgtttttcttttctagaataacatataactattatggaaatgcatttctagaactatgtatcaattccaaaaatacatttttggaataggcatatcttattgcataaagacatttatgatattagaaaatgaatgcttatcttacacctcttgtttgttagtcttatttctatcctatcttatttttattgtgtaaaaaagtttgatgtacattgtataatagataagtcaaccatggatataccttgaaacacaatgtcatgtggaaaacacagtagtatgtaaaggaggtttaaagaataatgaagatgggcaagtatgggaattcaaaattaggatttaacaacaacaacaacaacaataataataataataataataataataataataataataataatnataataataataaagatgagacataccttgaaaaactgtgtcacgtgaagaaaaatgcacaatattacatgtaatatacacattatacaatgaatatgggtaaaaaaaattagggtgtaaagaaaaataaagatatgatgaaaataagaactcatagatgatttaaagattactaacgatagaattaaaataacactaacaaacatgtgggtgtaagataaacgttcattttctaataccgaaaatgcctttccaaaataacatatacttattgtgaaaatgtatatccgaaactatatatcatattttgataaatacatttctagaatagttatgttattctagaaatacatttcttgaaaaagaaaaatgagttccaaggggtgtatctctttaagaaaaaaagatataataggcaattaaaacataaaaaagggaaatggggatgtatttagccaaaatgggggtgtaaatagtaagtgtccagtggaaaaaaggagcttgaatgtacacaaattgactttaggcccaataaagacttggttgaaaggccttttagtgaagaaaaaggatgtgaccgagacatgataactttaaaggagttgagcaatactatgaaaatcaaattggactggttggtcttaacagaacttagtggcctaaccaatttggttcaactattggattggtgaagtagttaacccagatcaacctaaattaaatcggttgggatttgttaaaactggtgacccaagcgattttggtaacctagataagtttgtgcagcttaatttataaaaataatctaaacgacattgttttcaatcaaaacgtgtttttgggaaccaattagtcttagcccaagtctataaatagtataacgctaccgttctcttcacgtaagtcacaaaccctaattctcgcggctcctttcttaatctcttcgatgatgaccactgcctctttgaatctcgctttcgtatgaccaccgggttggaactttgcgaacatcgtgagtgcacaatctgacaatctacaaaaattgatgttcattgttgtgtttgtttgacgattccttcgacgctgttcaacctgtttctttcttgttccccttcctctgttgttttccaagtatgactctacattcattctcgatgaatttatttccttcgcttttctcatacgtatgtacattctgtaatttgtagcaatatgatttgggtttcatttcatattttcctatttcggtttcataatgttaggtttcagttcatttgctgacaatttgtgtatatagcctttttattttttattttcttgcccattattgatttattcctttatttgattatgttagatttatttttaaaaatagaatggaaaacatgtatatagcctttgttttctttaacttgtttgcctatttttgatctagtcctttgtttggtcatgttggattgattcttgaaaattatggaaaattaagacctaattctttttaggtgaaagaaattagacaaccaaacagatcatttatgctttattttttcttctataacttagatatgttgattaattgttcattagttaaataatttggagtatagtagctaagaaattgtagttttggaatgttattaattaaacgtgtctattttggaagcatagtgaattgaaatttaggaatgttataaatttaatgtatctatttttgaacgaactttatttgcaattttggaattgggatataaggtactttatctcacacacacacacacacacacaattttgaatatatactaggtcaattagtgattcaccagtttgaccacatgcccattaacccaacccagtgccttgaccatgtcattttttcacaacattggagttgagtgaacaaattgaaataagttagaataatgatgatgtctgtgttggaaggatacacgaggacatattggaagtaaatttggtaaataaatatcgggattttgggactggaaatggagatttaaatgaagaaatcaaggaaggaacaaggggagaactggtaacatctagtattatgcaaggagcacaattgaagatcgatgaagggtatacgaaagcgtattactggaagctgctcacatggaaatcaattattcattccgagtgagaattttgcaacttcatcctacaaaggaaacaatgaaaagagaaggagaaaagatgtgagaatagcttatcacacatctagtaattccttgtctgatagtaacattaggaattacaacaagattttttggcttaacaaagaggtaatggaggttaagaatttatgggaattaagaaaaaccctaggagtatctcataggggtaatgaagaataaattatattaaaaaaaaactggtgcatttggaggagaagggacaatgggaaacaagaaaggtaaatgaagttaaccatgtgtggattaaattagtgaaaaaatgagaatcatgtcatacaatgtaaggggcttgggagggaaataaaatggaaattcaaaagaaaactagttttaaaggaaaatgtacaattactttgtatccaagaaaacaagaaggagaatgtgactaagttgctttgctaggcaatgtagggtgatagttaagtagagtggttgatgtatgcaacaagtgctattctttgtgcaaaaacatggaatgaaatggggatccatgggtaggtagaatatgttttgaaggaaaaatgaaggagttaaaaaggaagtatacaaaatgaaatgaagaatagtttggtaacttacagaggaatcaaaagaagattaaaaaaggatatgaattggcttaaaaaagagaagagttgcaagaatcaagtgaaatgaagtttttctatgaaaggagttttagaaaaagtggtggaaagttacgatgtgtaatgaatccttaatgaggcaaaaagcaagaattaagtggatgatgaaggggacaagaatactaagtatttctatttggtattttcactaaagaaagagtaaacacttgctaagagggttaaacattgagaggtcttgggaggagaatttgagtagaataaatgaggaagaaaggaagttcttccaaaataggtatttgaaggagaattggtatatacctaaactagagcggttaactttaaatagattccacaatatgtagagtttgaaaatcccaatggaaaagtcctgacttactcaccagaagatagtatttacaaggtctttgatcttaaaaggtacacgtttctataattagtttcaaataagcatgttcaagaaatcaagattagtcttagcatcgtgttattaattttcaatagaatgagtggccatattcccctcaagattatacccattggagatgacacatttctcaaaacattcaaccaccttattcattagaataggaaggtggacttagtagagctatttaatgaaaagcttatagttcaacaagataatgagaacccttaaattgttgatgttcaaaattttgagctaatggaaataagcataacaaagttcatgactccatcaacatttaactttttgtacgagaatccggtgttccttactttcaactttcgaacgatatttgtttggaactttcgtgagggagcttgtcacttcatttgaggatcaccaattgtggcacccaaaatacaatacaaataacatacacacaataagtaatcaaaatctcattatcttttatggcaggacaaatttttttaggatcataggatgaaacaggtggttgaatgtttttagaattacataaccttgaacaaatataatctaaaggggtatatgaccactttttctatgaaaattaataacatgatgtcaggactgatcttgatttgctgaacattcttatctgaaatcgagtataatagggtgtagtctttaagatcaaaggccttgtaaatactatcttttagtgagtaagttaggacctttccgttgggattttcaaacctacatatccaagccatttcaaacatttagactggaaaagaggaacgtcagcatctggctttgggcccctccttatgtattcaatctttgtgcttctgttttcgaaatagttaaagttctcataagcatatccatatactatataagtgagtcattgttcttactataaaagacattgtgaatgacttcatgaggacatacattgaaaaaacaaattctttccttgatttctctactgaatttgcagccaaactagactagtaaacaacggagaccacatttttggtagagacgatttcaacaactttagttcttctttgcatgatgaagggaaaaagggaagaataagcattggagggatcatattttccatattggtgcatcaagaaaatattgcagaatccatgagaggcagtggcagaggcaaaaaacacaatgaggcttcaagtaaatcttgtggctttgaagcatcttgacgacacttatatttttcattgatgccattgtatttcccctttctattttgcttgccactatgcatcgaacacaccaacctatacgcctcattctttccattctcaccattcaccaaaaacatattagtccctaatagttgcaatttagttgtggcattcataccacagtacaaataacacacataacgagttatcaagatcttattatctcttactgcaaggcatattctgaagatcaaaggatggaagacaatagtttctccattaatataagcgatatctcgatcgagaaatgtgtggctcaaattaatgcaacaagtagcagtgcttacagttgcaacaagaaaagtcacttatcacaaatgaagagttcatttgtagaggctttggaggaagttactgcccacttttatgataaagatagaaatgagatatatgttggtaacaaacatggtcttgttcatgtacagtatgactaatgaaaaagaaacatgaaactattttcattagttagaccatacatgaacaagatcatgtatgttaccgatatatatctcatttttatcttcatcataaaagtcggtagcaacttaacttctcattaaggatgaaggagtttgcttgttgtaggtgcaagctctgctattgcacctgtcatccttgatgtcaatacttgttgcattaattttagccatgcatttctcgatcaagatatcactgatgaaattaatgtagccagtgttttctttcatcccttgatcatcagaatatcccgtgtagtaagagataatgggatcctgataactttttatgtgtgtgttaattgtattgcaatatggatgcgacaactgaattatatttttggtgaagtggtgagaatgaaaagaaggaggtgtgtaggttggtgtgttcgacgtacggtgacaagaaaaatagaaagggaaatgcaatggtgtcagcaaaaaatatcagtgtcgtaaagattcttcaaagccacgagatttatttgaagcctcattgttcttttgcctttatcattgcctctcacaaattatgcaatatgcgtttgacgcaccaatataacaaatatgatccctccaatgtcttttcttcccttttttcctttgacatgtaaagaagtgctaaactttctgaaatcatcgctacaaaaaaacacaatcttcgttgtttaccagtgtagttttgctacagattttagaagataaaccaatgattggattttctttttgaattcctttcctcatgaagtaatccacaacctcttatataatacgaacaatgactcattaaagtatgtatttatgcttttgagaactttagttttttcaaatgaagacccacaaacattgagtacataaagaggggcatgccacatgtcaagtttcctcctttttaatataaatgtttgaaataaccataatatgtagagttttaaaatcctaatggaaaaatcctaacttactcactggaagatagtttttacaaggcctttgatcttaaagagcacacctttctataattagtttcaaataagcacatttaagaaatcaagattagtcctagcatcatgttattaattttcaatagaatcagtgtcatattcccctcaagattatacccattgaagatggcacatttctaaaaacatttaaccacctgattcattagaataggagggtggacttaatagagctatttaatgaaaaaacttatagttcaacaagataatgaggacctttaaattcttgatgttcaaaatgctaagctaatggagataagcataatagagttgatgaatccatgaacattaattttttgtacgagaatctgttgttgcatacttttaactatcaaacattatttgtttggaactttcatgaggagcttgccacattatttaaggatcaccagttgtggcatctagaatgcaatacaaataacacagacataacaattaatcaaaatctcattatcttttactgcaaggcaaacatttttaggatcataggatgaaactagtggttgaatgtttttagaactatatcatcttgaatggatataatcttgagggaatatggtagctggttctatttaaattaataacatgtcaagactgatcttcatttgttgaatattcttatatgaaatcgagtataatagggtgtagtcattaagatcaaagaccttgtaaatactatcttctagtgagtaagctaggacctttccattgggattttcaaacctacatatccaggccatttcaaacatttagactggaatagaggaaagtcgacatctagctctacacccctctttatgtattcaaatctttgtgcttttgcatttgaaagagttgaatttctgtgaagcatatacatatactgtaataattatgtcattgtttttattgtagaagaggttatggatgacttcatgagggcatacattcaaaaaacaaatcctttaatttatttctctactaaagttgcaaccaaactagactagtaaacactaaataccatgtgtttggcataaatgatttcaacaactttagctcttctttgcacgacgaaggaaaaaaatggaagaaggagcattggagggatcatatttgtcatattgatgcgtcaagcacatattacaaaatttgtgagacacagcggcagaggcaaaatcacgatgaggcttcaaacaaatatcgtggctttgaagcatgttgatgacattgatgtttttgctaatgccattgcatttcccccttttattttgtttgccattatgtgtcaaaaaaccaaccaacatgcctccttctttctattctcaccacttcacaaaaaaacaaatttgcccatggcaataataatttaatcgtggcatctagactacaatacaaataacacacacttaacaactgaatatgttctcattatctcttattgcaaggcagattctggcgatcaatggatggaagacaacatttgctccattaatgccagtgatatcttgattgggacatcaatgaagacgagtgtagtagcagttcttgtggttgcaacaagttctagaggctttagaggtagttagtgcctgcctatttttatgctgaagatagaaatgaaatatatgttgataataaacatggtcttgttcttgtatgatctaactaatgaaaaaaaaataagaaactcttttcattaattagatcatacatgaacaagatcgtgtatgttaccaatatatgtctgatttccatcttcatcataaaagacgaaaataacactatttccctcttttatgatgaagatagtaataagttatatactggtaacaaacatggtcttgtttgtgtatggtctattttaaccttattatatgtgaaggtttgtaaggtgaggtttgcacttcactcatatactctgtttctccaggctctgggaggccaaaaatcccatgtttcagttctgtaaggtgaggttttgcagttttgcaatttgatgcaggtaagacatcacttatctttaaccatctagaggtggtagattgcgacttgatagagggtggtctggtagatccaacaacaatcactaggatatgacttgataccatcttagaatgtgagtttaagcctaactcaactctaaaaaatcaacttgtaagatgggatttgcactttacttatatactctattttagccatatgactagtcaatgtgtgatctctaatgattagaatatgtgaagggtagcaagtggagtgagcaaatataggtatttatgttggaaaacttttgagtttaaacacgtgtaggtagatatgggtcccaatttttgtgagcattgaatgtcatgtcctccctctgttctttttataataaaaaattagtgttttttttctcaaacataaataaatatcaattattttttttcttgttatttgatattatctttaaaatgtcctctacttaataagagatttatacttgatatcaaattcaatatgaatactctatctctatcttacctttcttatacttatcacaatcatttggattaatgttgataaaaaaaatatagaacaaactacatcgaactacaaagaacaaagtaaaagtaaataatgataattttagcttactatgcataaacatgagtgtcaaattttgtgtagtttgccttaaaaatgcaacattttgacttaatgttaaaatgtatattattattttcaaaattatttataaaggattagtttgtgcacatttaattatacatagaattcatggtgaatcgctttttgtccatagtggaagtgaattattatttttaaaaagatattctttttctcgcattattattttttttttaagtgatcacattattttgttgatagcggaggaaataataaattggaattacataaaataatttaagcaagtatagtattttcaataatatttttaattcatttttctggttttttttaagtcatttttctctaagttaaaactttagttaggccttttcctgttatatatactttaattatacttataataaccttccttttggttaacaagagtgtatatctcttatgttttgacctacttcaacccaaaatcatgtgtttttgaatgatttagaatatcgaattactattggacttaccaagttgttgggttggtataacttttcagaaaaaggcttttgcttcctataccccatagagaaaatgtagttctagagaatatattgatatattacgaaacataaattttggaatacattaatacttgtatccagtgttgtgaaaatcagttcgaaccggacgattggaccgatccaattggtacccagaggcataaccgggccagtttggtatttggatcggtcatgcatctggcccgagatgatccggccaaacctggccgatcttgcggtgacccgaccgattttttaaacctggtcttgtgcttcacgctctcactgtctcacgcttcggccgtcatcgtcaccgccactgctgttgccaaagcaaaccataaaggcaaaggaagagtaaaagacacattagtgaggggaagaggaagaggcgatgatgatcgaagaggaagagggtagcgtagcaaactagtaggaaaagaggcgcagcatgggcgcaacacggcaacagcggcatagtagggcaagaagaaagaaaagaagaacgtgaaaacaataggaatacccacaataaccaagaggggggtgaattggtttgatcttagtatgttaaaaaaattgtttataaaatcagagttaaaggattttcatcacttttaaaccaagaatacttttaatcaatcaaatcactcagctcaagaaattaatagctcaaaactgaacttgttgagtaatgataatgatgccaagaacaaatgaataagataactgataaagatgaaggaatagaaaaacaactcaagaatttatactggttcacttatcaaaagaagctatatccagtttgttctaatccacaccagattagagttccactattataaattccagttcttacaagctttacaacaaactctctttatcaacactagataaagaatagaaatctaaaatcctattagatttctaatgaacaagaaccagagaacaatactctgttcttccctagagaacactactctagtccaagcttcaaagaacccttttacaatagcatcaaataacaaacattacaagaacgaatttacaaccaaagataatggagagaaacaacctgatgatccaatgaatatgaatgcatgagttaccaatcagagttgaatgcagaaaaagaatttcagaacatgctctccatcattcctttgaaatctcttgcccaagaaatcattcaatacccatgaagatttaaagagtaggacaagagcttagttaacccagaaaatcactttcaaactcttagaagacttgggtatattcagaaaatttgaagtgttcaagttaagtttcaagacaagcctcctttctatttataacaactttttgtaacaacctgtagttgattacacgtgccaaataatcgattaaaatgacttatgtaatcaattaaattgtcacttattcaaggctttattctgggtttcacaacgaacaaaataatcgattaactcaagctggaatcgattaaaacagaaaagttttatttcagaatcagtttgtgtaatcgattacattttatggtaatcaattaaagcagtgaagcaagctttttcaaatagcttatgtaatcgattatgaataatggtaatcgattaacacaacaatgcacaaaattcattttacactatgtaatcgattacaagagttgcgtaatcgattaatatgttcaccaaagcttttccagtttcaaacatgaaccaaataatcgattaatcagctgtgtaatcaattaaaacagtggaatttacatttttacaaaaacattaatcaattaaatcctttttcaaattgtgagtagctttgatattttaatgaaaacatttaagcatgttaatgattaagtgcatgcaatgcaagaatcaaaagattggcttcccctacacttcatttgaattacaatcttcaaggtatgtgaaaagctcaaaacattcttctaagtcataagcttcattcttcttgttgctccccttatatccaacagaaaatatatatatttttggcgttaggttttttcttagttaggccttcttgccatatatcgcttcctataccccatttttttctttttatagtttctattttgctttttttttttatattttgaagtgggcttctgaattttgacttattttatttttttaatttagacaattgctatttacactttcttttattattaatacactttatttatgttatcaactttaatacttcaattgttattttagatttttgagtatgaaatcatggatgaattttttttaattaagtaatgttagttatacgtatatatagtataatattgattttttttaatatagatcggatcaaacactactagaaatattagttttaacatcgctatgttaacatcagttattgaaaaaatcgatgttaacgaaaacgttgtggcagattcgtaagtaacaggttctcgttaacgacagtttttaaaaaaattgatgttaactaatacctgttaacatcggtttttttaaaaaaatcgatgttaactaatccttgttaacggttttattaaaactgatgttaacgaagacctgttaacatcagttttattaaaatcaataaaactgatgttaataaggacctgttaacatcggtttttaaacaaaatctgatgttaacgaggacctattaacatcgatttttaaataagaattgatgttaactaggaccttctaacatcagtttttaaataaaaactgatgttaacgaggacctattaacatcagttttagataaaaattgatgttaactaggaccttctaacatcaatttttaaataaagactgattttaacgaggacctattaacatcagttgtagatagaaaccgatgttaacgagaacctattaacatcagttttagataataattgatattaacgagaatccattaatatcgtatttttagataaaaactgatgttaatcaggacctttaaaattgatttttaaatttataaccctttttattttatttataagactcgatttagaatttagatttagtttttttcttaaattattattatacaatctaaaatattttccttaaattattattttacaaaattaaatttaaattattttgaaaaaatggtctttaactttcgataaaaggataaatttatctaaaaattaagtttatgcataagttaaaaattattcttttagagaaattaatataagtagacttttacaagttagtttatgaattttttttataatttctttccctaaaaatattcttagggaagtttatcaatttcaaagacatacattattattgtgtaatataaatgttattaattcagattaaaatatatatnnnnnnnnnnnnnnnnnnnnnnnnnnnnnnnnnnnnnnnnnnnnnnnnnnnnnnnnnnnnnnnngacatgtgtaaatatttttattgaaaaacattgtcatatgtattattataaatagatgtgctaagtggtagcatgtctatattgcaaaggacggaataattaataattaattagaataaatcttataagtagtctagaatnnnnnnnnnnnnnnnnnnnnnnnnnnnnnnnnnnnnnnnnnnnnnnnnnnnnnnnnnnnnnnnnnnnnnnnnnnnnnnnnnnnnnnnnnnnnnnnnnnnnnnnnnnnnnnnnnnnnnnnnnnnnnnnnnnnnnnnnnnnnnnnnnnnnnnnnnnnnnnnnnnnnnnnnnnnnnnnnnnnnnnnnnnnnnnnnnnnnnnnnnnnnnnnnnnnnnnnnnnnnnnnnnnnnnnnnnnnnnnnnnnnnnnnnnnnnnnnnnnnnnnnnnnnnnnnnnnnnnnnnnnnnnnnnnnnnnnnnnnnnnnnnnnnnnnnnnnnnnnnnnnnnnnnnnnnnnnnnnnnnnnnnnnnnnnnnnnnnnnnnnnnnnnnnnnnnnnnnnnnnnnnnnnnnnnnnnnnnnnnnnnnnnnnnnnnnnnnnnnnnnnnnnnnnnnnnnnnnnnnnnnnnnnnnnnnnnnnnnnnnnnnnnnnnnnnnnnnnnnnnnnnnnnnnnnnnnnnnnnnnnnnnnnnnnnnnnnnnnnnnnnnnnnnnnnccttcccacaaaacacttccttattgataatcacatttctcaaacaaaatatgtcacatactttttatattttaagaatattaagtacatttaatattttagtaaatattttctttatcatatattaaaaaccaataaaaaatactatcgtcaaaggatacattattcattgttttggtagaaagacaaattaatctagtctttcccactttactttttttatttaaaaaacaattttaaaagtaattgaagaagaaaaaaagtggaggatttgcataactcatgagaacgaaaagactcgagttgcgtagttacgtgaattttttcattccatttttaacttttaaaagtgtttggattaaaaaaaaagaagtaaatgaatggcgtagagtttgctgatataaaaaaaagacttcaaaaattggaagggtaattttgtaacaaaaaatactgataattaaatggagacttagtatttttttttcattccattttgaattggaacagagtagagtttactgctctctgcaatttcaatcatcatcttctcatggttagggatttttctccaattttcttccctattatcattaatctatttaaattggaagtaaatgatttacttaactttaattaatgttgtttttaaaaggcacatgactacaccaccgagctcccctcctcctcctaagtcatcaccttcgtcgtctatgtcgaagaagactaggaaagcaacacgactgaggtcattggttaccaaacccatcggtgtcgagaaaccactagttcatgtggatcctgtcactggaaaggctgatggtccccataaaaagaaattgaggacatatttggggatcatcgctcgggacaaggtggatgtcacaattggtaactggaaggaagttcctatagctcagaaggattggatttgggaggacattcaggtattagaattaaatgttcaatgtcaatgtaattggctgtactaatacaattaaaatgttattgtaacagttaaatgtgttttttgtatcgcaggctgaatttgatatacctgaggctttcgaccaaaggacgaaaaagaaaattcttcagacattagagagcgaaggaggcagtttaagtcaaatttaacttccaaatgggccttgacacaaggtaaggacgaagatgacaacacgatctgtgagaaatgaggaattagcaaagaaaagtggcaccaattttgtgagagtcgtagagccgcttcatgggggttattagtcttgcattgtttttgactttggaaattatgcagtattttcaagtgcattttattgacaactatctgtgtaattgtaacaggatgtcacaattggtaactggaaggaagttcctatagcttagaaggatttgatttgggagggcattcagttattagaattaaatgtccaatgtcaatgtaattggttgtactaatacaattaaaatgttattgtaacagttaaatgtgttttttgtatcgcaggctgaatttgatatacctgaggctttcgaccaaaggacgaaaaagaaaattcttcagacattaggagagcgatggaggcagtttaagtcaaatttaacttccaaatgggctctggcacaaggtaaggacgaagacgacgacacgatttgtgagaaatgcggaattagcaaagaaaagtggcaccaattttgtgagagtcgtagagccgcttcatggggggttattagtcttgcattgtttttgaatttggaaattatgcagtattttcaagtgcattttattgacaactatttgtgtaattgtaacaggatgttagaaagatggctcaagccgtccataaactaaacactgcccctcacgtgttgtctcgtgggggttatgatttattagaacaaaagttaatggaggaaaaacaaaaagaaatgattggaggaagcagcccaatccgggagcaccgaaataatcgttcatcctccatctcctgttagatgacacgtgaagtggaagatgactcgcacaaaaaaatcaggagacatgacatctgaggcggcacatgaaattgcagaaaggattgtaaattaattattttttcaatggtcattaattacaaaaacaacaaatttgaaaactcatgtagtatttatgttgattgcaggataccctagaagagtcatcaacatagggtagctttgtcgctagtggacataaagatatattgactgttgccattgggcgatcagagcactcaggttgtgtccgtgctgttggaccgcgtgtgacgatcaaacaatacttcggaccggcttcaacaagctcttgcacgtctaagtccatgaacccaaaagaattgaatcgactgaaacaaaatatccgggaagagcagtcgatcactgaaaaagttactcaacaactcatgttgtccttcagccacatgcagttccagatgcaatcccatatgcagtctcagatgcaatctcagggattcatacttcctcctaaggttgagattggtccttctggtgtccgtgtcagcacgaaggaaagccatgtcaatccctctgggctggaccctgacatgggtgcatcagacaggcgtgggttgtatgttgatgacaatcctccctgcctggttgcccttggaagagtttatgaggggtcgataactgtgcataacgtccctttggctaatgatcaggtgaaggtgggtgttaaggaagtttgagatgctgatgctcgtgtccctgtaccactaaagaggttcagttagtggggcagacccttaacaccttccttgcttggccaacacatcttttacatgctatttcgaaaaatgtatttactttttgttgtgtttattatcatttaaaatgaattaatttgttacacataaagtgttgactgtcattgacttatgttttttaactgtgtaggataaacaaagacctaagggaccaacaaaacatgtacataagccggaacctgatgacgatcccctataccagatcccatcgaccatcccctagctttttctcagacccatgcaggtgtcgtgggatactattgtgtttggggtgtataatgacgacatccccttgtacatcaagtatgaagatatttctaaaataatacacggtggtcaatgtctgaacatctctattttataattgtggattttgtaagtcactttacattatagttcattatgttgttgattgtttcaaattaatgcataatttactttattttaaaaataataggcatacgaatgacttaagtctgcaatcagataatgtctctgtgtatggattccttgagccacagtccatacagatatctgatcgatcgcaatttgaatctgacgactatattaagaaatggatgcagacttcgcataaacatgtatacctagcagcgtacttaaatgggtaagtaaaattgtacaagtcaaattaaataattaatgtagtataataacttaatgttctccaatgtagcatacattggcaactggttgttatatgtactaaggaagatgttgttgtatggttttgttccttgcacaacaagccaaataattacttgaaaagaattattaacaggtaagttgtaatttctaagacatttactttattggaaagacatgaaaatgttaattgtataatatgcatgtatgtttttcttaaccagtgttttgaagggattcaatgatactcaaggaactaaatccaaagctactcctaaatgaattgcaattaaagtaagtcatttaaacaatgattgatgtcttcaaaattacttttattactatttacactaatttctggttaactttaaatatgttattcaatttaatgtaatacgcaaaaaggaagcacggagtgtgattattatgtcatgcactggatgtcaacgatagtacaagaaggcttcaagaataaatgagacacggtaattgtttacttcaaaaataatttttatttgttatacttatttttatttatacttattaagttatgttttattatattatgcagtattttactgatcgaagaccattgaaattagagagattgaaggcaattcggattcagtgggcaagattttatcttaaagttagaaatgaaacactagatgactaaggaatttttaaataattgtataaataatttaattacaattgcttatagtgtattgacattattgttttctttgatcattacaactcatagtaacttttgatcgtagtgtgaaactatttgcctgtattggtctgtttttaaatttgcaagtttggataatatttaaaaaatagacaataaattaaaaaaactacaaaaatcaacatcagtttttagtaaaaactaatgttgtttaacattaaacaacatcgattttcaataaacactgatgttgattcacaaaaaacaatatcagtttttagtaaaaactgatgttgattcaaagaagcaacatcaatttttcaataaaaatttatgttgattcaaaaaaacaatatcaattttcaataaaaactgatgttgattcacaaaaactacgattttttgctaaaagctgatgttgtatatttttgttaacattgattttttaaaattgatgttaacgttgatacttttaacatcactgatttcaagatcaagtaaaaatcgatgttaaaagctccaaaaaaactaatgttaaagttagacctgtcaaaacgggccaacccggcccacccgggttggcccaccacgggttgtgaccaaagtgagccgggccgggttggctcactttggtggtgggtcaatttttttacaacccggctcaacccacctgggttggtgggttatacgggttggcccggcgagctggctcgtgagctggctcgtgggttggctcgctttaaatttaaaaaaaaaacttaaaaaattacaacataagcaaagaaaaaatgcaaattaaaccaatctaagtaagtttaaacttaaaatattacaaactacataaaactcaaacaaacataaacaaacatcaatatgttcattgttcaacaatcaacaacatgtcaacattaaaatttaaaatactaaaacacaaatctaagtcttccaaagttccaatgtcaaatcccatatgtcaagcatcaatattaattagtctannnnnnnnnnnnnnnnnnnnnnnnnnnnnnnnnnnnnnnnnnnnnnnnnnnnnnnnnnnnnnnnnnnnnnnnnnnnnnnnnnnnnnnnnnnnnnnnnnnnnnnnnnnnnnnnnnnnnnnnnnnnnnnnnnnnnnnnnnnnnnnnnnnnnnnnnnnnnnnnnnnnnnnnnnnnnnnnnnnnnnnnnnnnnnnnnnnnnnnnnnnnnnnnnnnnnnnnnnnnnnnnnnnnnnnnnnnnnnnnnnnnnnnnnnnnnnnnnnnnnnnnnnnnnnnnnnnnnnnnnnnnnnnnnnnnnnnnnnnnnnnnnnnnnnnnnnnnnnnnnnnnnnnnnnnnnnnnnnnnnnnnnnnnnnnnnnnnnnnnnnnnnnnnnnnnnnnnnnnnnnnnnnnnnnnnnnnnnnnnnnnnnnnnnnnnnnnnnnnnnnnnnnnnnnnnnnnnnnnnnnnnnnnnnnnnnnnnnnnnnnnnnnnnnnnnnnnnnnnnnnnnnnnnnnnnnnnnnnnnnnnnnnnnnnnnnnnnnnnnnnnnnnnnnnnnnnnnnnnnnnnnnnnnnnnnnnnnnnnnnnnnnnnnnnnnnnnnnnnnnnnnnnnnnnnnnnnnnnnnnnnnnnnnnnnnnnnnnnnnnnnnnnnnnnnnnnnnnnnnnnnnnnnnnnnnnnnnnnnnnnnnnnnnnnnnnnnnnnnnnnnnnnnnnnnnnnnnnnnnnnnnnnnnnnnnnnnnnnnnnnnnnnnnnnnnnnnnnnnnnnnnnnnnnnnnnnnnnnnnnnnnnnnnnnnnnnnnnnnnnnnnnnnnnnnnnnnnnnnnnnnnnnnnnnnnnnnnnnnnnnnnnnnnnnnnnnnnnnnnnnnnnnnnnnnnnnnnnnnnnnnnnnnnnnnnnnnnnnnnnnnnnnnnnnnnnnnnnnnnnnnnnnnnnnnnnnnnnnnnnnnnnnnnnnnnnnnnnnnnnnnnnnnnnnnnnnnnnnnnnnnnnnnnnnnnnnnnnnnnnnnnnnnnnnnnnnnnnnnnnnnnnnnnnnnnnnnnnnnnnnnnnnnnnnnnnnnnnnnnnnnnnnnnnnnnnnnnnnnnnnnnnnnnnnnnnnnnnnnnnnnnnnnnnnnnnnnnnnnnnnnnnnnnnnnnnnnnnnnnnnnnnnnnnnnnnnnnnnnnnnnnnnnnnnnnnnnnnnnnnnnnnnnnnnnnnnnnnnnnnnnnnnnnnnnnnnnnnnnnnnnnnnnnnnnnnnnnnnnnnnnnnnnnnnnnnnnnnnnnnnnnnnnnnnnnnnnnnnnnnnnnnnnnnnnnnnnnnnnnnnnnnnnnnnnnnnnnnnnnnnnnnnnnnnnnnnnnnnnnnnnnnnnnnnnnnnnnnnnnnnnnnnnnnnnnnnnnnnnnnnnnnnnnnnnnnnnnnnnnnnnnnnnnnnnnnnnnnnnnnnnnnnnnnnnnnnnnnnnnnnnnnnnnnnnnnnnnnnnnnnnnnnnnnnnnnnnnnnnnnnnnnnnnnnnnnnnnnnnnnnnnnnnnnnnnnnnnnnnnnnnnnnnnnnnnnnnnnnnnnnnnnnnnnnnnnnnnnnnnnnnnnnnnnnnnnnnnnnnnnnnnnnnnnnnnnnnnnnnnnnnnnnnnnnnnnnnnnnnnnnnnnnnnnnnnnnnnnnnnnnnnnnnnnnnnnnnnnnnnnnnnnnnnnnnnnnnnnnnnnnnnnnnnnnnnnnnnnnnnnnnnnnnnnnnnnnnnnnnnnnnnnnnnnnnnnnnnnnnnnnnnnnnnnnnnnnnnnnnnnnnnnnnnnnnnnnnnnnnnnnnnnnnnnnnnnnnnnnnnnnnnnnnnnnnnnnnnnnnnnnnnnnnnnnnnnnnnnnnnnnnnnnnnnnnnnnnnnnnnnnnnnnnnnnnnnnnnnnnnnnnnnnnnnnnnnnnnnnnnnnnnnnnnnnnnnnnnnnnnnnnnnnnnnnnnnnnnnnnnnnnnnnnnnnnnnnnnnnnnnnnnnnnnnnnnnnnnnnnnnnnnnnnnnnnnnnnnnnnnnnnnnnnnnnnnnnnnnnnnnnnnnnnnnnnnnnnnnnnnnnnnnnnnnnnnnnnnnnnnnnnnnnnnnnnnnnnnnnnnnnnnnnnnnnnnnnnnnnnnnnnnnnnnnnnnnnnnnnnnnnnnnnnnnnnnnnnnnnnnnnnnnnnnnnnnnnnnnnnnnnnnnnnnnnnnnnnnnnnnnnnnnnnnnnnnnnnnnnnnnnnnnnnnnnnnnnnnnnnnnnnnnnnnnnnnnnnnnnnnnnnnnnnnnnnnnnnnnnnnnnnnnnnnnnnnnnnnnnnnnnnnnnnnnnnnnnnnnnnnnnnnnnnnnnnnnnnnnnnnnnnnnnnnnnnnnnnnnnnnnnnnnnnnnnnnnnnnnnnnnnnnnnnnnnnnnnnnnnnnnnnnnnnnnnnnnnnnnnnnnnnnnnnnnnnnnnnnnnnnnnnnnnnnnnnnnnnnnnnnnnnnnnnnnnnnnnnnnnnnnnnnnnnnnnnnnnnnnnnnnnnnnnnnnnnnnnnnnnnnnnnnnnnnnnnnnnnnnnnnnnnnnnnnnnnnnnnnnnnnnnnnnnnnnnnnnnnnnnnnnnnnnnnnnnnnnnnnnnnnnnnnnnnnnnnnnnnnnnnnnnnnnnnnnnnnnnnnnnnnnnnnnnnnnnnnnnnnnnnnnnnnnnnnnnnnnnnnnnnnnnnnnnagacagagagagggagcaagagagagcaccaatattattgatagtattgatgcaaaaacatattcaactcacatttaaatctattgagcacaatggtgaatcatgatttccatgaacttgtagtttttcaagttgagatttgtccttgaaattaagaaaagagtaaactttttgttaccaaaacaatttccacacacttatctctaatttccacacgtataatgacaatccataaacatgttgagttcctctgctataaacttgttctaagttgtgtatcataccttaatagcggtggcgacgaagggatggagggacggagggagtgactggccgaggtggtgccggactgccggtcggtggagggacttcgaaggaaggcgacaccgatgagggtgaggccgtggagggacttcggtggaggtggactcaatggaacgcgccaggcgannnnnnnnnnnnnnnnnnnnnnnnntgagtgttgagctttgcgttttgatttagggactagggttcactcacttttgtgagttttgtgattttgtggactgtctggacagtggcttgaatgagaagggccggcccatatgagagaaatcactcaaatcagctttttttttttttttttaatatgtaacccgtgagccaacccggctcacccgggttcaacccgggtgggttgtgggttaagtgggccgggccatttcaacccgggatcaaagtgggttcattttttatcaacccaacccaccaattttggtgagccaaaacgggctggctcgcgggtcgaacccgttttgacaggtctagttaaagtctattttttagtagtgaaactgtaacgccccaatccgctggtcagggtcattaccaaacatacatcacaatcaagcataaaaacaatcagagtttaagcagtttggaagcataaactagaagtgacatcatcaaagtcactatcataacactgtacatcataatatggtgaatatacatcaaagttctcactgtacaatacaaaactgtacaaataacccatcagggtatgtcaaagtacataaccaaaacatatgagcaacatgctcaagtcctctatcctagagtatccagcagcatctaatcctgtataggcctcttgccttgggatttctctgctactctggaagannnnnnnnnnnnnnnnnnnnnnnnnnnnnnnnnnnnnnnnnnnnnnnnnnnnnnnnnnnnnnnnnnnnnnnnnnnnnnnnnnnnnnnnnnnnnnnnnnnnnnnnnnnnnnnnnnnnnnnnnnnnnnnnnnnnnnnnnnnnnnnnnnnnnnnnnnnnnnnnnnnnnnnnnnnnnnnnnnnnnnnnnnnnnnnnnnnnnnnnnnnnnnnnnnnnnnnnnnnnnnnnnnnnnnnnnnnnnnnnnnnnnnnnnnnnnnnnnnnnnnnnnnnnnnnnnnnnnnnnnnnnnnnnnnnnnnnnnnnnnnnnnnnnnnnnnnnnnnnnnnnnnnnnnnnnnnnnnnnnnnnnnnnnnnnnnnnnnnnnnnnnnnnnnnnnnnnnnnnnnnnnnnnnnnnnnnnnnnnnnnnnnnnnnnnnnnnnnnnnnnnnnnnnnnnnnnnnnnnnnnnnnnnnnnnnnnnnnnnnnnnnnnnnnnnnnnnnnnnnnnnnnnnnnnnnnnnnnnnnnnnnnnnnnnnnnnnnnnnnnnnnnnnnnnnnnnnnnnnnnnnnnnnnnnnnnnnnnnnnnnnnnnnnnnnnnnnnnnnnnnnnnnnnnnnnnnnnnnnnnnnnnnnnnnnnnnnnnnnnnnnnnnnnnnnnnnnnnnnnnnnnnnnnnnnnnnnnnnnnnnnnnnnnnnnnnnnnnnnnnnnnnnnnnnnnnnnnnnnnnnnnnnnnnnnnnnnnnnnnnnnnnnnnnnnnnnnnnnnnnnnnnnnnnnnnnnnnnnnnnnnnnnnnnnnnnnnnnnnnnnnnnnnnnnnnnnnnnnnnnnnnnnnnnnnnnnnnnnnnnnnnnnnnnnnnnnnnnnnnnnnnnnnnnnnnnnnnnnnnnnnnnnnnnnnnnnnnnnnnnnnnnnnnnnnnnnnnnnnnnnnnnnnnnnnnnnnnnnnnnnnnnnnnnnnnnnnnnnnnnnnnnnnnnnnnnnnnnnnnnnnnnnnnnnnnnnnnnnnnnnnnnnnnnnnnnnnnnnnnnnnnnnnnnnnnnnnnnnnnnnnnnnnnnnnnnnnnnnnnnnnnnnnnnnnnnnnnnnnnnnnnnnnnnnnnnnnnnnnnnnnnnnnnnnnnnnnnnnnnnnnnnnnnnnnnnnnnnnnnnnnnnnnnnnnnnnnnnnnnnnnnnnnnnnnnnnnnnnnnnnnnnnnnnnnnnnnnnnnnnnnnnnnnnnnnnnnnnnnnnnnnnnnnnnnnnnnnnnnnnnnnnnnnnnnnnnnnnnnnnnnnnnnnnnnnnnnnnnnnnnnnnnnnnnnnnnnnnnnnnnnnnnnnnnnnnnnnnnnnnnnnnnnnnnnnnnnnnnnnnnnnnnnnnnnnnnnnnnnnnnnnnnnnnnnnnnnnnnnnnnnnnnnnnnnnnnnnnnnnnnnnnnngaaaaacaagggtttctggggtacttctcacgcgactcgcgtgaaatcccacgtgactcgcgccaccctctcggctatatcacgcgactcgcgtgacataccaagtgggtcgcgccatatgccagacaacccagaacttgcattttaagcctcttccaaaggactcttaagcatgatcacattcccttaacccataaacttagattcatgcttaatctaagcttaaacacgtgattaaaattcaaggtattacattacttccccccttttatgaattttgtccgcaaaattaagatcatacctggtacctaactcgggatacagctgtagtaactccgattctctctaatctgcaccgtgtcaggctccaccacgtgtgtaggatctgctacatacttcctgagttgtgacacgtggaatacatcatgcaatcctgacaactggggaggtaaagctagcctataagccactggtccgaccttctgaagtatctggtaaggaccaataaatctagggccaagcttcctcacacccaatactcgcccaacaccagttactggggatagtctcagaaacacatggtcgccctcctcaaattgtaacggcctgtgtttatgatcataaaaactcttctgtcgactctgagctcttaacaacttgtctctgatcatcttgatctgctcagaagtctcctgaaccatatcaggtcctaacaactgtttctcacctacctctgtccaacaaacagaagttctgcatctccgaccatacaaagcctcataaggagccatgcccaagctagcatgaaaactattattatacgagaactccactagaggtaagtacctgtcccatctagtaccttgttctaaggcacaggctctcaacatatcctctaaagtctggatggtcctctcagtctgaccatctgtctgaggatgatatgctgtactgagtctcaactgggtcccgaaggcctcctgaagcgcactccaaaacctggaagtgaacttagggtctcggtcactaacaatactctcaggaaccccatgcagtctaactatctctctgacatatagctgagccagcttctctgcagtatggtcagtcctcacaggtaagaaatgagcagacttcgtcagtctatcaacaatcacccagatggaatcacatccagtctgagtcctcggaagcccaactacaaaatccatggaaatactatcccatttccactcagggatctgtagtggttgaagcaaacctgacggtctctggtgctcaatcttaaccttctgacatactaaacatttggtgacatactcagctatgtccctcttcatccctggccaccaaaatctcctcctgagatcctgataaatcttggtagcacctggatgaatactgaactggcctttatgagcctcagacaacactgcatctaccatctcgcccttaggcaccacaatccggtcctgatatctcatcaactcatcaggctcccagtgaaactctcgtcggcccatcatatctataatcgaatcatcttgcttctgagcctctctgatcctctgtattagctcgttatcaactctggtccgactcaactccagaccactggtaccctcagtcaccgtcaaatgcatatctctgaactgctcaatcaactcacagtcagagatcatcatgcatgctatactcagatgtttccggcttaaggcgtcagctacaacattcgccttgcctggatggtatctcaactcnnnnnnnnnnnnnnnnnnnnnnnnnnnnnnnnnnnnnnnnnnnnnnnnnnnnnnnnnnnnnnnnnnnnnnnnnnnnnnnnnnnnnnnnnnnnnnnnnnnnnnnnnnnnnnnnnnnnnnnnnnnnnnnnnnnnnnnnnnnnnnnnnnnnnnnnnnnnnnnnnnnnnnnnnnnnnnnnnnnnnnnnnnnnnnnnnnnnnnnnnnnnnnnnnnnnnnnnnnnnnnnnnnnnnnnnnnnnnnnnnnnnnnnnnnnnnnnnnnnnnnnnnnnnnnnnnnnnnnnnnnnnnnnnnnnnnnnnnnnnnnnnnnnnnnnnnnnnnnnnnnnnnnnnnnnnntcatgagtccatacaaatggattacccttcctggtaaggcgagtcaagggtaataccatctgtgaaaacccctgaatgaatctccggtagtatcctgcgagaccaaggaaactacggacctctgaaacattcttgggcctttcccaagacatcacagcatccactttactcggatccactgagacaccctctgcagagatcacatggcccagaaatttcacctctgaaagccaaaactcacatttagaaaacttagcatataactgatgatctctcagaatctgtaacacaagtctcaggtgttcagcgtgctcttcccgactcctggaatagatcagtatgtcatctataaacaccaccacaaactgatctaggtatggtctgaaaactctgttcatgtaatccatgaacactgcaggcgcattagtcaaaccaaaaggaatgacctgaaactcataatgtccatacctggacctgaaagctgtcttcggaacatcctcgggcttaatccgaatctggtggtatccggatctcaggtctatcttggagaacacgcatgctcccctcaattgatctaacaagtcatcaatacgaggcaaaggatacttattcttgatagtaaccttattcaactgtctgtaatcaacacaaagcctcatactcccatccttcttcttcacaaaaaggactggtgctccccacggagatacactaggtctgataaactctttggacaacaagtcctcaatctgtgccttcagctcctttaactctaaaggagacatgcggtatggagctatggatataggtcccacacctggaaccagatcaatggagaactctatccccctatccggtggaagctgtgtaatctcatcaggaaacacatcaacaaactctctcaccaccggaatctctgacatatccactccctgtctctgtaccgctgtactcaacaatagatatccctgagctcctcctctcagttccttacgaacttgcaacactgaaaggaatgaaactaaagtcgggctaacatcatctgaaggcaccactactctcttgttacaacaatcaagcatgaccccatatctggtcaaccaatccatacccaaaatcatctcaagggtaggcatagacaaacaaaacagatccacactatactctctgccatcatacaagaaatgtacgtttctgcaacatctctccaccctacactgctctctagaggctgtaatcacctccatgggagaagaaagtctggacataggcaagtccagtctcaaagcagtgtgatcactgataaacgaatgggtggctccacagtcaaacaaaactctaacttcacataaaccaataactactgtacctctaatcaaatctggagcactggctgcctccctagcctcaactgtataaactcgtcctgtggtaggtgccgctgctgagatcactggggcagctacagcctggtctctagcctggggacaatatctggaaaaatgaccaggttggccacacctataacacagcgacgtgccccatctgcacatgccccagtgggtcttgccacatgtggtacatctggcagctgaccctggtcgtggtggtctatctcccggtttcctcttgaacttgtctggcgaggatgaaaccttcggacctctgcccttgctcctactagctgagcctgtacctccagatctccgctcctctggtctattagaaggagtaaagcgactgcccttccgtctccggatcatatcttctacctgacggcactgtctgaccagactccccaactctctggatccactgccggctatcctcttctctatgtcctctctaagtcccctctggaacttagctgcaagggtctcattatcaggtaactctttcctgaaatgagcatatttggctaactcattaaacttagccaaatactggtcaaccgtcatctgcccctgtgccagagtctcaaattccgcctgcttctgttctctggcgtcacgtggaaaatatgtatccaggaactgggcctcaaacgcctgccaggtgatagcctccccctggcctctcatcaactctgatgtagtaacccaccactcgtgggcatcaccctggagcatgtaagtagcatagagaagtcggtgatgatctgaacattccatcactgtgaagatcttctctaaggcctgtaaccatctggccgccaccactgggtcatactctccataaaaagctggaggatcatgcttacgaaaagctgtaagcatccttcctctagccatagattcctcctccagaagtgactgggaaggctcacctctaggatggccataaccttcagcacgatgactagctccccctatctggcgactaccctcgccctcagggataggatgtggagaatcatccctacgctgagctctcaactcagccatcagatcctcattggccttcatcaactgctgcatagcagccaaggcagtggtcaaaggatcagggtgttcctctgcacctgcctcatcaccctggttccgggtcctcaccatggtactgcacatattacataaaaagggtgagttgatcaagctcactctcaacagttacacatgcaattaccataatgaacaccctaacacacacatacaacacataattcaccatatgtacagtgcttccctatcaaactgctctgataccataatgtaacgccccaatccgctggtcagggtcattaccaaacatacatcacaatcaagcataaaaacaatcagagtttaagcagtttggaagcataaactagaagtgacatcatcaaagtcactatcataacactgtacatcataatatggtgaatatacatcaaagttctcactgtacaatacaaaactgtacaaataacccatcagggtatgtcaaagtacataaccaaaacatatgagcaacatgctcaagtcctctatcctagagtatccagcagcatctaatcctgtataggcctcttgccttgggatttctctgctactctggaagaatcacctgcaaaacacnnnnnnnnnnnnnnnnnnnnnnnnnnnnnnnnnnnnnnnnnnnnnnnnnnnnnnnnnnnnnnnnnnnnnnnnnnnnnnnnnnnnnnnnnnnnnnnnnnnnnnnnnnnnnnnnnnnnnnnnnnnnnnnnnnnnnnnnnnnnnnnnnnnnnnnnnnnnnnnnnnnnnnnnnnnnnnnnnnnnnnnnnnnnnnnnnnnnnnnnnnnnnnnnnnnnnnnnnnnnnnnnnnnnnnnnnnnnnnnnnnnnnnnnnnnnnnnnnnnnnnnnnnnnnnnnnnnnnnnnnnnnnnnnnnnnnnnnnnnnnnnnnnnnnnnnnnnnnnnnnnnnnnnnnnnnnnnnnnnnnnnnnnnnnnnnnnnnnnnnnnnnnnnnnnnnnnnnnnnnnnnnnnnnnnnnnnnnnnnnnnnnnnnnnnnnnnnnnnnnnnnnnnnnnnnnnnnnnnnnnnnnnnnnnnnnnnnnnnnnnnnnnnnnnnnnnnnnnnnnnnnnnnnnnnnnnnnnnnnnnnnnnnnnnnnnnnnnnnnnnnnnnnnnnnnnnnnnnnnnnnnnnnnnnnnnnnnnnnnnnnnnnnnnnnnnnnnnnnnnnnnnnnnnnnnnnnnnnnnnnnnnnnnnnnnnnnnnnnnnnnnnnnnnnnnnnnnnnnnnnnnnnnnnnnnnnnnnnnnnnnnnnnnnnnnnnnnnnnnnnnnnnnnnnnnnnnnnnnnnnnnnnnnnnnnnnnnnnnnnnnnnnnnnnnnnnnnnnnnnnnnnnnnnnnnnnnnnnnnnnnnnnnnnnnnnnnnnnnnnnnnnnnnnnnnnnnnnnnnnnnnnnnnnnnnnnnnnnnnnnnnnnnnnnnnnnnnnnnnnnnnnnnnnnnnnnnnnnnnnnnnnnnnnnnnnnnnnnnnnnnnnnnnnnnnnnnnnnnnnnnnnnnnnnnnnnnnnnnnnnnnnnnnnnnnnnnnnnnnnnnnnnnnnnnnnnnnnnnnnnnnnnnnctcttttctcttctctccctctcagccccaaatggcttcttataaaagcaaatcgtcgatcccacgcacctcgcgccactattccacgcgactcgcgccattctcttctggccttccacgcgactcgcgtggaatcccaagtgactcgcgtggagctccagagaaaaacaagggtttctggggtacttctcacgcgactcgcgtgaaatcccacgtgactcgcgccaccctctcggctatatcacgcgactcgcgtgacataccaagtgggtcgcgccatatgccagacaacccagaacttgcattttaagcctcttccaaaggactcttaagcatgatcacattcccttaacccataaacttagattcatgcttaatctaagcttaaacacgtgattaaaattcaaggtattacagaaactgagccaattaatggcctatcagttggaccactgattcaataacccattacttcaactgaatcagtgatcagaacaaattttataatactgaaaatatattaaaaaaatatgctaacactattagggattcagtaaccggttatcaacaactactatgggttactcaatccggaacaattgtaccaccattcaagaacacttaatacaagtgtttcctgcaaaggaaaataaagggaagatagaaggagaacgagcataaggagaaaacaagaatgcagtaaatgaaggtttacagctgataaactatcggaggcatgtttgaaggagtggtcgaatttggagaaaggtgagagagaaagttatttataatttataactgttaataatgaaaattgttttatttaatacacacattttaatggataattttgttcttaaattacttcttaaattttcaatttttcttctaacttacattaattttctactatttttatattattagttttttttattttgtcatttttattaactgtatttaaattttattttttattatttaaaaaaatttagagaggcctaataataaataaaggtaattcagggttattaaaattatgggttgcagaaagcaattgcatgaggaaataatatttttcttggtttttgacaaagaggcatctacacacaaaagaaaacagagaggtaacagatatttccgcaccaaaatttaaaaacaagacggtaaagagatttatcttataatcaatcttaaaccgtgattcacatttttttccccaatatttttttaaattcatgattttgatttaattataacatttaatttctttaattttataaattaacaattttatctcctaatatattcaaaaattaaaatttgacctaagatatctacaaataagttggattgagtttgatttcaatgttaaaaaatacaacttaatttgttgggttgatttgaatctaattggatttgcaactaatccgtacatataaacactcctatttttggaacaaaaacacaatcggaatataatatgcatataacattcgtgattattgtatgaatataataatataaaaataaactatgtataaaatggtaattataatatttttaatttatataataacttaaaatgttatatggaaaacgatgattgattgataaataatataaaatcttttactgtatatttattaaactctaacgttaaaatataaaaagaaaatcctgcactgtacataaattatgaatatacaaagaaaatgacaaaatcccgtaaataaaaaatatcattaaaagtaaagatactataaaaattgataaatatacattaacaccaaaatgctacttgacaacagatatagaagtataataaagaaagtgtaaagattaaaaaaaaaagtgttcaccctccagcatattatatttatatgataattgtttacttttttttctttcttttctatctatataataatattaataataatagtaacaaactaacgataataaataataaaaattcatgtaaaaataataataacaataaataaaataaataaaatttttaatatgttttttttacttacttttttttaacacgatttctttaattcaaataattcatatattttttttcattctcttatttcctcccaccaaatacaatggaaatagcatatcataatacgttcctccttacaaagccaaccagcacaccataatttgaaaccaaacattctgtatgttggaagttggaacgatatgttgagtttgaaccttaatcgatctagacccatcaaatatcttaatgcgtgttcaaatgaccgttaataaaatttattttaaataaaattcattttagttaaaattaattttgaggagatgtaatttttatatttaaatatttatattataaattaaattataaataaaatttaataaaaatatatttaaaattaattcagcaacggaaaaccaacactaattccatacttcatcttcatccaatgaagtagcaatacatacactaacttgtagtaacttccccactaacgactctttctccctaagccatggccgaaaccgaaccatgtcccttccttctcctcgcactcttctcatgtaccctcttccaagcttcctccaccgccaaaatcggcgtcaactacggcaccgtcgcggacgacctccctcctccgtcaaccgtcgcagccttcctcaaatcccaaaccaccatcgaccgcgtcaaactcttcgacgccaaccccgccattctccgggccttcgctggcactggaatctccgtcaccgtcacagtccccaacgccgacatcccctccctttccacactccccgccgcacaagcctggctctccgccaacctcctccccttcctcccggccacctccgtgcgccgcctcgccgtcggaaacgaagtcctcgccacctccgacaaaaccctaatttcgcacattctccccaccatgaaatcgctccacgaagccctaacaatctcaaacctcaccacaatccaactctccacccctcactccctcggaattctctccacttcaaatcctcccagcgccgccgcgttccgccgcggctacgacaaagctatcttcgcgccaattttaaacttccaccgcgaaacgaaatcccctttcatgataaacccgtacccgttcttcggattctccccaacccgacccgagagtctcgcctacgcgctatttaaaccaaacgacggcgttttggaccctctcacgggttttaactacaccaacatgttcgacgcgcagatggacgcggttttctctgcgatgaagagactcgggtatgctgacgtggagcttgtcgtggcggaaacgggttggccctctgtgggtgacccgaatcaagcgggtgtgggttttgacaatgcggcgtcgtataatgggaatcttataaagcacgttaactctgggagagggactcctcttatgcctaatagaacgttcgagacttatgtcttctctttgtttaatgagaatctcaagcccactgtttctgagcggaattatgggttgtttaagcctgatcttactccggtttaccacgttggcgtcttcaccgccaaacaggtactcgcgtattccgtatttttttaatggataaatattagtttgttaattttattagaaatattaattaataaatttgaatcacgatctcttctttctttctttatattcaatattatatctctagatatagttattaacttactttgctttctctttatttttaaaattttaaattattataaaaatggaaaatggatgcttgcgtgcatgcagatgcttgctttctcagtagtcagcttttcgttcaatgtgtagcttagcttctgttttcagacactagaaagttgattgaaggtagacgaccgagatattggtcaatattttagtgttagatcttatatcattttttttttttaagtagattttataatgttaggtaggatcgaagattttttaagattttttctattttattattcaaatgataaatcttattttaagatcttgagagaaaaaggaaaaataatttattcttttttaacaatatacatatcttaaatgttcttctataaaaattcatgagttaaagatgttttactaaagttattcttaatcttcttaataaacattagttcaaattggtaggtttcattaaattaaataaacttcataatggataaacttttataaggtaaggttaaatttcataatttttaaacatgctaaacttaaatttatctggtttaaataatcaaaataagtctaagttttttttattattttaaatcgaacttaaatttctagattttaatatcttaacaaaactaagatttactgataaaaaaaaattgcctctactcgtgtactcccttgcaaaataatgactaacatatatgtctttcctgcttgcatgtataacgctgcccctatgttgtttagcaaactttacatatctgtagctttaatttcaagtattagggttggctccagtcatttatacttcttccaagataatgcccaataattttttttctttttgttttcttgcaagtacagcactgcccagtctgccactacctgatttaaggtttatctgtgttgtttttttatatggatagacatttttaaaggagaaattatattgtgcacaaattttatatataacatcatataacaaggtgtgaaataccaagtatacagaaaattattataaactaataatgatatacatttttatattgaaataataaaactaaaaatatttataaaataatgatatttattgcagtatttttatcttttatttttctatttatctttaaaaacaagattatataaaccattttccatataaaaaatcacgtcctttctgattccagaaaatgtcaccgtccttaacctaaaatgccaaaatgatcctattcaaattgccttctatgattcatttatgggagcaatgcaacagactatataatgcctaacgaaaaatgttaattaatttcttaaaagtattaatctggaattccaaaataaagtattataaaaaatagtaggcatacatttttgttataaaaattgttgatttcttaattagtgtccgatgaatactgattaagatttatttagttcattttatctttctaacattaaaatgatttatacaaagtattgcaataatttagcgttacgctactaccctttatttattcttgttaacccatgaccaataatcaataaattaattaaagaattgatgtttggttaaccgtttaaaaagtattttttgagtgttagaatatactttttagagaataatttcaatttcgtgacatgtttgatagttactctcaagagtatgtatacttgcgcagtaaaattgtcttaaaatttaatttgtagaaatatgactttgagtgactttaacttggaggattacagtgtgagccaatgatgagggtcatggaatcaaagctatgtgatacggtgtaagagcaaatttatccatgtaagaaaaagaaagaatcaagtgtaaggagcaaagtcttattcagcaaaaaacaaggagggatgtttcatttatcaataattccttctttttcttaatataaatctcctttttatttttgtttttacgctaatagattgaaccttacgagttaccatttgtttaatgttgtgtagtgtaataataataatgtaaatgcaggcactgggtcccacatctagacccacggcattaacaccttcagagtcacctttatcatcatcatcatcatcttcttcttcttcaaaaaaatggtgcgtgccgaaaacaaatgctagtgaagcagagttgcatgcaaacattgactttgtttgcagacacagtggaatagattgtgggcccataaaggatggtgggccatgcttcaagcccaacacagttaggtcccacgcggcctacgccatgaacgcatattaccaagcatctagtcatcacgattttgactgtaatttcggccacactggactcctcatacaaaccgaccctagtaagtaaatgatcaatttaggttatgtttgattttttttgttttggatgtttacattcaattagaagagtatatttattttggttacatgtttagctatctttaaaagtttgcacaggaaaattgtctaggttttatgaaattaaatttgagttgtttttacaaaatcagtttataaacttaagtttaattcaaatttaagtatataaaaactttaatttaaacatgcattcggtctttgaatttgtatcccgttattttagtgtttgaaaataaaaaattcaaataagtctctaatttttttcaatttttcatttaaattcctaaaattcaaataagtaacctgtttttcttattttggtacctataattatgttattattatcatttaaatctttagaatacggataaaaatagtaagagattaaatttaaggaactctaggaaaatttattagattttttttaagaaaatagtaaaatcacaagatacagattgagagactaaatttgtttgctcaaatatatagtattcaacatgggagactatgttttagtacatttggtccaatattttaattggtcctaattataagaaatatatgattacacttttttttcttataaaaattgatgcatttattgaactattaataaaataagacatatttattgattgaataattaacacatctcaaattattaaaggatatgggtaatcttgaaataaaattaaaatatattaaaaaaataaataattgtttcttatatcttatatgtttttaattataagatattttttagaaatttgtttgtttctttatatatgtattctttaatttctgaatacattaattattttttccttacatatctttacttagttattctttctccaaacattaaagagaaataattaagtggataaaaagataaagaaagaagataattttaaaatgatagtataaataattaatgtgattagttaaattaaatatttttttagaaacataaattaattaatagtatcttataattaagaatgaaaagaataatatataagactagggttagtactatttttgttgtgtttttcttggaaagagaagaagtgaagtgatggaatactatgtggcaggttatgagtcatgtacgtatccaaatgacgctactgggactggggatgggctgaaggtcagaaagccgaatacaggtagctcactcagacgtgccacttacaactctggatcatatatcttcttatttatcattcaaattctaatttctttctgttttttctaattttattgcctgtgtttctattaatgttatgaatgcaacgtataaaaatgatgataacgggaaggtactgagtagtattattagtattgttttcttcttcttttaggtcctactgactcggctgggtagtagtacttcgatctgggttgatatatcacagatattttctttttcattttttgttgagctgcacaagctttaggcattagctaaatcaccatggattcttggcaaattagtaagaatgtatattaactggcgcatactattcttgatttttttataggtattttttttttttgaaaaattgacaaacttaatatgttaattgttagaaatattaattaaaaagatttcaactcttcacttcttcctcctttcttttcccttcacctttttccaatcattggatcaattttatatctccctgttctttgttaattgattaatgtgatgttgaaaaataaattaataaaatattttgaaattgagttattttataaattgaaaaaaatacttgaaatgataaattttggggttaatgtaagaaaaatagactgcatttcctacgtgtgcagctttacctgatgcttttaaatttttgtagctattggtttactcacaatctatcacatataataaatttattgttttttattataaatactttgaaaatcataccaataatgattttttattaattaaaagtgtcaaaagttttacactgataatatagaatcgttaaacaatttggtttaagtggtactcaaaaccttattttgaatggagaaatataccaaatataataatgaaatcatcaaaacatatttttaaccaaggtattataatgataataacttagactgaatatgtattataatgattgtcagtatttacggggccaaaactaaaacttcaaggttagccttgggcgttgtctatatagatatagacgtatagtggcccaatgcccatgagtaaacggggatccaaaatatagtttaatagttttttttttgtatattattttcataaatagtttgaaattttatcttgttttatgtcttttttatccaaataaatgtcataattagaaaaatctcttggttttttttgttgttacattcataaattcatgttaaataaaattttagctataaaagctttgtaatggacctcctcattgtcttactgtaaaataaaatgttcctcattgtctttcttcactgttttggaactttagataaaaacacataatatgaaacactatttctatttcgtggtggcaaattggtcgaattccgtatcatggtattcaataaattcgtagtttttatacacaagtagaacggattttatgaaatacgcaaaatgctacagaacataattgtgagaatgatgatgagtgaacgaaaatcgaaatacaatagacaaacaaaataatatttccaaaagcattcttatatcatatagtgaagcctttaaaatgaacagtataagtgatctgatacttttactacatacaaaatcatgaattcattcgatatcttttcctcataattatcacaaggtcaaaataacaaggtaaaatgactcctcgtcggaaaatgatgcttattttccacaattgaacccacggcagacagagaggactattatgaggatcagggctatcaaaatcgccaacacaatcagctttatcttcatgttttgcagccacatttttctacgaattttggtcccagaattcctgaagtcttgtgcctgcctcaaaaattagtgaaaagtaaacaaaatagcaaagacagttaccaataatttgttacctccaccgtttttttgaggtggagaggagtgggtagatcttaccaagagagacactacagcatcaaatcaaatagagaaagaataatccagaggataagaaaatatttactaatgatcttgaagcatgaaagaataatcctcctaagttcaagacctttgataccctaagcagttacaggcagatgcacatataacgatgaactgacctggtgatgaagattttcagttttgtcaaccagaagctctatcttttcccccctgtccagaacctacattaaattaagagcatgtcaatataatctgaatagatgtcaacataatccgatcgaaggtattggaatgcaaaagaatattatgtgtatcattatttatgactggtttaatctctgcttttctttagtgtgcataatgtatatcattatggcatagagaagacatagaaacacactccattatgtgtcattgaaatgcacaaaattttaactgtctataagaatgcagaggaatagcaattggtaattgaagaaggataaactcttacacaaattcacaactaagtcttggcttatttataattatttgacttggaaaacaattgaacttgaaaagttattcacaaaacacagcagcccaacccaagtgcaattggagtaccattaactatttaaggagaatacaatttctgggattcggatcctctcctgctatttagtagaatgatatgattatgttggaaagagaaagacatttatcatcaaatataatttgtgagtcctataactaatcatggtggattcttatttgataaaaaatgtgtctttcccctccatgatcacatcctgtttctcaacagcagaggatccattctgttaattccttcctttccctccaaacacaattaccttcctgtatcctcgtttcctgcctctcatctggtaaaaacaaaaattggggcccatgatttaggggcctataaaaaaagtctacctttcagtcaaactacttttagctagaattgctttcagaaagaaataggctaatagcctaaagaacttggacattcaaaacataaatcatcagtcaataactaagtttaactatcaatctatagagaagctaatgaatagaaaagtcaaaataaaacataagcaagcaagcaagcaaatgaattcataagtcataattctttagcgtccctactaaatggtagttcaccctaagcaaactaccccatattcaatgtggacattgaacgttagttacatttgatgtgtgatctatatttataaataatatttcatcaggtaacatccttctgtttctttgcctttggaaccacataaagtgatgcccgaagccttactttcagaagaactaaaacacagcaattatatagcataataaggcatttatagagtgagcaagtggctgtgcatctgtgaagcctctgtttcaaaagaataaaaacaaaacaatagaacagcctaaataggatgcagaaagttaatgactgcaagaagtatgagtgctcataaactgatccaactcattcagcgtaaacagcaacaacgaaccaaaatacaaaagccaaaaaagagcaattttttttattggattggatttcagatccaatttcaaagactaatataaatccaacccaaactaatataaatatgcataagtttatttaagaacttatcttatcacctatatttatataaatatgcattaatgacattattagttttattaatctatggccttactctctaaattacatcttatcttattatttaaaaatatatttataaattaataagttttggatgaatttatttctagtgtctcatttttatcaaatcatttttgtatttattttatataaaaatgtttttgaaaaaaaaggagtaaaacagataaaatatgatttatattttgtcctaaccaaaataataataataatctaattcaaaacattttagattagatcctatcagatttcattttagaataaaatcaattggatggtaaaattttaaaataacaaattatgagattggatcaaatagtttttctccttagatctgatatattcctggaacacctgtgtgtgaagcccctacttcataacaacgaaaacaaagcaatggaataataaatcaaaggtacatttagtagtattcctttaacttcttttaattcgagagtttaatcttatcttctaattttttttatgaaaattgatgaaagaaatgcaaaaaagaaataaaaataacaaactgctgatatgtgggaatcaccctggtccatgcacacatatcacacagtccaaagtcaatttgtattgaatcacttcactctaaacgtgtaacaactattacagactctagtatcaataccgcatgagcacaatgctgtaattcaacaaaatgctgtccagactatttaaacagtttcatatatgaggttgaagcattcacacatttagattttcttaaagatccactcctacattccccttgtctttgttgttataaaaaatttctaacacaaccacaagtatacttccctctataagacacaactcttgccatttatgataacaatgcaactcgatctacttaatttacgcttgatctattcaatttacgcaatatcatcctcttaagtcaaaccaagtaagcaatatgcatcgttaccttttcaatgttctccatcatgacatctttaacttcagaaacctgagctttcaccttagcaagcttgcttatctcttcaggatgctcaacacagtactgcatgtgctccttcaacttagacctacagcaagcaaaaacacaagagtatataaaatcttctcttaaacaacacaaatcacaaatcacaacaaattcagcattagcaagttcacatgtcacaaattcaatacccgaattccttgttcaggctgttcgcggccgcggttgctgcctttccaccgccgtatttggccacaaaatcatccttcacacgctccagaaaagccacaggcacctgtctcccaatcgattcatccgcaacaacacaataagctacaaaaagcaagtgtgtgaatcagacattcattgccaaaaacacagcaccgaacttcaaataagcctataaacaaataataacaacacgaatttcatcaaaatagcctctaaacaaatcagaacaacatgaatttcatttcatttccaaacacaacaccgaacttcaaactagcctctaaacaaatcatagcaacacgaatttcatttcactaaaccgcgtttggatgttcgaattgaaaaattccaccagatcggtacgaggaaacactcactgaatccgttgtcgacgaggtagttgaaggtgtggccgtcacagttgtaggtgaacttgttgttggaggcagggagcttctggaggcactgaaacgcgattgtgttgaagttgccgctgaattcggtgtactcggcgagaataaccgtgccgcgagacacgaacgcgtagatcagcgatctctggttctggtcctgtcccatcttcttcttcttcttcttctcttctcccagatctgtgcgtttgaacctgattttggtaactgtgtagtgttgtgtgcttctattacctacactctcttctttttcttttcttttcctttctttgatagagagagagaaagagaaaagagagaacgatgagtgagaaaaaagaacagagtttatcgcgcttataaagcaggtgatgtctccgatgtggcgtttaatccgtggaaagtaaactaggtttttaattattacttgggtttaattatcgtcaatttgtttgtattaggttttaaaatgacgaataaatcttgatataattctccactgatgatgactcatgtattttttttgtttgtggaaggatgcatcatgtatgatgtatctacaaatacgagccgtaaggtggaaaaaaaaggcaacggaaaattgaaaatttaaaatttgaactaaaaaatggaaagttaaattttgtattttagaagttgattttttttttctcaactttttctttgattgaataaaagaaaannnnnnnnnnnnnnnnnnnnnnntatttttttttttttgctttatccaagcatagtaaaaatcaatgttttagataatttatgttcacattagtccttaaatattttaaataaaaaaatagaatattgacggaaaatgaagtggtggcattggccttaagatagcatggaacaatggtagaaccttgcggctacaaataataactacggaaagtgaaagaaataataatttaattgaaatttaaataatttacattcgtcctttttgtttgaaacatccaacttaccctcctgacggcgcccgctaatccaacaacaacaacgacatctcaattatctgacattcactaaaataataacatttaaatttagtttaaacgtacttttaatcataataaacactatttaacaatgtcttttccattgaattacgtatttatatattaagaatttgtattaattttatatttaggagaaaaatttgtattcaatttttatcatatataaattttatttaatcaacaacaaccacatattataagcaaaattagtttttaataaaaataatcttggtattacgtttgaattacatttgaatatttatatttactggatataacttttaaatggttggactgttccaatatgcatatgaagattaaaaaaatgtatgcttgttgtttgtctttgaattgattaaatatttaaattgattaccaagactttgcaactgttttgctttcaaataatgaacctttaaaattttatgtctatattaggatagcacattagcactagcactacacttcttatttcctttactaaagataactttgtaaacagacggatttaggggacaagaagggttgtgtcccctccctctttccttaagactcttcatgtatatgtatgaaaaaaaaagaagaaaaaatattaaaaaataaaaaatagaatattgaattaatatttatttaattttcttttaatagtggattctatttttagttttacacataaaattaattataaatatttttataaaattcattatttatgaaaaattaaatatttaaactattgtgaataaaaaacagttgacccatttaatacatttctgaatctgcccatccctgtaaatattcaaactcggtagtttctaaaaacaatcgataatatacttaatagtaagtagattgatgttagttttacatggtagatacattttcttttgtttcttttttaaatgaaaaatttatcaaaaatcaactgctataattgcaagatatttattataattcataaatgataatgttattttgttatagtgtaccgagaatactatctatcttcttttcatcttttgggtttaacctatcctatttaaagttgagtgaaaaaaattgtgatcgtcaagaataccctatgtcattgttatctaatgtaaaaaagtatagctctacattctctcaccaactagaagcttgctaaagtagtgatagatgctgtttcaaaatctaaccaggtggaaagtgttgcgtcatggactgctcctagttgggtgttctcaaatgcaatgtggatgcagccttttggagtcaggataaaatagtaatagaaagttatttattttattaaaatgtgaatgtagccttttaaataaaaacaatttagagaagtagactaaaaaagtagaaagctatttattttattaaaattaatatttttaacaattatgtttaaacaaactggttctatatcttttgtagttggctatgaagttatccagggtgaagcattaggcttccttcatgctttatttttggcactgcaattgggactcccttctgttatctttgaattagactgtaagcttgtagtagattgggttctccgtgaagttgatgactcatgtattaacaagagctttcgttggctatgctagtttcactttgtttaattctatgtctagttgtatttcttagttgagttgattatcaatatatgatatgagttaagctttcttccttaaaaaaacaaactcctgacgaaattattaagtaacaaagttatttgtcaactatcataactatattggtaacatattagtgttttcaaagcaacatttgatattgaaaatctagttcaaatcattgctcagatgcttaggatattttaaagaatgaaattgtttttttattttctatcattgctttcactacttaatccattacatgttttggattaattggatcaattacaactgaaatgatgagatgaacaaaaaagactaataacttttattcataagtgaatagttgaacctaaacattcattggttcaacaagctcaatagctcttatgtattatttttttctactcacctttactcttattatccactacttatttgattataacctttctctaatatttgtattagtattgacccatttctactcacctttagtcttattaaaatgacattgagatttgtctcccattttgttacgaactcttacttttgagtttttacttatgctactaatcatttttttttatctaggtttgtatttcctaattatatttggatttgtgactctcaaatgatgtcaacattatcattaataagtgcattgatgtttaaagctagataattttaatataaaaatagactttattatatttttttctttttcatgttttaaaaaatatttttctaaaaaacaataaaacaaaatatagacttaactttcctgtcccactttcacactcctcacagtacacaaaggaatttttagtgtattggtggtctatcttttaagtgtcattagatatgtgattgagattgatgacttgaaaatggtgtaacaagtaatgcaagctttttttttcaagaattgcaaataaattcatttccctttcaaactccagattataattttgggttttgtgagtggccctttagtccaatagttggaacaaatcatagtaaattggtatattctaaaggccagaaatcattactatgttttgcattttgatgatcctttttatttaaaaacacttaccaacatagatgtaccattaagtttggtggggccagcccctctgtaagtcccactctaaaacgggtcgttgctttggtgggaactaccagtaattactatttaggtatttatcaaattttctgctatggcttaaaaaaaacagtaatgagatagaagacagatttggtagtgaaactaccgtcagaaatcaatccctaatgaaccaaagttctgctttgattttgatactttaattcccaaatgaacctattttggtcgttgatagggacgaaattaaaaaaaataaagatgaaaataaataaaaaattagcaggaacaaaaaaaaaaaagagttaaaataaatgttacgtcgtaaagttaaggattaaaatgtaaacttaataaaattagagatttaattaattgggaccgtttaagggatttaaaggaaagttccacctatatgattattgattagattctttcttaatatgacgtacaatcaaagcataggaaacagctcaataataacgtttcgaaagggattcacatttttttttacaagaaaaaggattcacatagaaatctttcatgttgaatggcaaaatttacaaaacataaaaaattataattatatatcaggtgaaatatgtttttcatccacataaaattagtaaaatatggattttgttcctataaaaaaaaattgtctatttttccccctataaaattataaatattaattttttatccaaagttaattttcatacaagcatgtcactcttttgcttaagtgtcattccttcattgtctcaactggtggctactattcttacaatttctgacctagcctccaaattaaaaaaaaaaaaatctgtcacaaatttttaaatccctctttcgttaacttctttgaaacacttgtgcggaacccagccccatgtgaagagtgctagagagacactgtgtaatgtctacttccattctaagttcaaggaaatggcagcttgtgatagggaccttatgaccgaaaacaggccaaagaagtagaggttgcggttttgagttgggaggtatcttgttcgaaagctagggaggataataattagggaaggaggaggagaaatgttcatgtttttggaatggaattactacttaagttgttggtcatcgggacttgatgaaaatagtagcttggattatcgaagaataggaccagacaaaaaaattcaaatatataaaactaacatttatctaattcaatctaatctactttaaattcatttaaataatatgattttatatctaaatttaattttttagattttaaattcaatccaattaattggatatttatttgaatttttaaatccaatatgattttttggacaatgactgtaagatttttttgaccgacttcgatacgaactattttttgatcaatatcgtctatagttatttaattttagtcaacatcaatcgataatatttttaagtcatcatcagttgagattatttttcaattaatattaataagattttttctgtcaacattgattgagactgtcttttgatctatattgttcaaagtttttttgactgacatcgattattttttagtcgatattaaccaagagtattttgtcaatgcagattattttttgaacgacattccataaatttttcggatgacattagttagaaattttttggtggacgtaaatgttattcaattattgtaataatagttgtgaaagtcccaagcaaatatatgtatccccaaaactaatttccatgattttagccctgtcaattatgtgcaataagtgctattcaattattgtattccaatataagaaaaaaaatattttatgctaattaaaaattaattaattaaacttaattattctaactttaataatattttttttcctaaatatatttttattggactttaatatcaagaataaaaaattattaaaagtaaagtctcaattaaataaaagataatttagagataataatattaaatgagataaaattaattgatttttttatatttaaatcaataatttttattctttttaatatttgagactaaattaatattgatcaaattggacaaggtgggggcatcttccctattttcatttcctggctgggtaactgggttcatgccatctttcagcctatcctggtcccgtcttagaaagatttgcgtgaacatttaccctattttgtatttaacaattctataaatataatcctacaaattttatttctctaccacacaacaagcccttcaaagcataaaaacaggcccttgtaccaaaagcagcaccagatggaaatagctattgtctattcactattgattacttggattgcaatctatttggttaatagaagtggaagccattgagaagtgcaaattacaaactgattctctctctctcaaaattataataaagtaaatgacaattaacatcgagattaatggtcatggactaagtagtgtaaaaatttatttcatagtaacatccatttattcatttactttcttcaaaataaaataaaataaagtatttagctatataagtatattaatatcttaaattttttaaaaattgttactgttacatcttacgttgtgactttcacctccttcttgtagtcttattatgtcttcgcctcatgcagtgaagacaaaagtttttccttcgcatatgaaattataaattcattttattcaaattttaattaaaaaattnnnnnnnnnnnnnnnnnnnnnnnnnnnnnnnnnnnnnnnnnnnnnnnnnnnnnnnnnnaaataataacaaatttaaatcaaagtatatactaaatccaaactaataataaatccaaaccaacccaaactatacctatccttacttttccaacaaaatatattctcactttaattatttaaaatcaataaaaattagtgttaacaaaacttctatttagaaaaacagaactattaatcactactaaattcatgatttgaaacaatctactactaaattcatgagttgaaacaatttatttaacaataaaaattgtactcaaatcccaccatgtacaaaattttcttagatcaacgtcagtcacacactactaacagaattaatttctaattcaatgaattaggagacatatgtgatctctaatttaagagaaaaaaaaataacacaaataatagtgacttttatttctttaattaatctgggttcgaatcctaattttgaataataaatcatgtttagaataaaatactcaccttatatgtacacttgtaacccttgacaaaaattagtcattgcttcttacagtgaatattttatatcaatactatgcttaacacaaaaaatgttgattactatctattagcctgccagtaatcttaccaataaaaaaagatttgatagaaactaaaataagcaaatctataagccgagaaaggagagggatttgaaccctcgatagttctttatttcgaactataccagtttttaagacctaacaaccactcaaccatctctacccaagctaattaatattttaaattcaaaatattcattatctgtaatttcaaggtttattatcgaattatctattattttttatttcatcaaacatattgcaaatgtgatctggagacaatgtgcacaaaggtattctccaactcactatagacaaatcttcgaaaaaaagagcagccacacagattttacctctactggtgaaattttttccagagactaaatccttaatcaacatattcaaaaatatgtatatttcaactgtgccaaccttcggtaatcatcgcccctccattaagagaaaagaagtggggggagagaagaaaaaaatgttaaaataaaccatctcagatagcaacaaaacagaaataagcaattaacttaccagttcacaggagattacatctttcacgacagaactatttcagaaggatgatactagttgatgaagttgcttacatattaataaatcaatcagccattacatgacgcttaagacaattgacttctccatccttcctgtctcactgatatctaattggcacaaaaattcttcctttcctaactgcttcttcccttcatttgttttggttgggggtgtgaggagaaataattacatagttttcactcagttttagtagtatttgttggttcataagcagcatcggcagaagaggtgtctatatcattcagacctaattcttcattttgttcccatgacctctcgtattcctcaactgtaagacatgaatatatttacatgaaaaactaagcagccaagtgtagataacatgccaacaattctaaacaatctgaattacattaaacccattcatcacgagtcaacttatgcaggttactcagcatgtaacacaaaaggttgaaacacatgcccctaacaagggtaatgtcacaccaataaacttcctatttttttgtttgtttacttcacattgcagtatactggattaccaagcaactccaatggttgaattgaatcagatatcttaagaaaaaaaaatatttcctaccaataaagagtacccaaggaatgacctgatccatagttatatgattaagtatagaaagttgaaagttaaaacatcactatacaagcaaactgcagaacacaacaaaaccaaaaggcaagaaaataatctagtttttaatttcagtacactcagaaaacagaaaattatcatctcaataacttgaactgcccattatcattaaccgtagtgatactagattatccaatataaaacattgaaaaatcatcacaaacctttctttttaatttctattgcaatttctggattattacatggtttttcaacttttcatatggtatatagagagaactagaaacatctctcatggaaatgaatggaattagtatatagatggaaatggaatattatgaaataaagtcactttgaggttcatgagcaaaagggggacaaaacagatattcacaatttcaatttcaaactaagaaaatataaactttatctgcacaaagtatagcttcatatctgagttggaaaacttacatgataattgattgtcctctttcaaatcatcagttgcaggtgctacaaaagaattggctaatgcatcatcgagaattagagtccaatcttcttccaagctaagaagctgcacagaaagtgacccttaagaatgtatttggttaaaattccattgactcttctttttgttattcgtttccttttctttttatatataaaattcatcaaactgggatagaaacaggtacacaaacaggataacacatcctactagaagagaacaagaaatataatacaatataattcagagatacaaatgaatttaaaatgcctgtcattatctattgctcctcttccctctttccccagtcagcagcaaaacatggtgtaaagcataaattacaaatctgatggtaatctaatcaatagaattataaaatgaacagatataagagaaattcaatccaactgatgtaaatagtcatttgctaccttgtttagccttgctttaaaatctatccacttgttttttctctgctcatcgagactatctccaaaagtaaagccatggacccgctcaaggcctgtacatgcaaatcacatcaaattatcaaattatattctacattctaaggttatctatggtggatggcaaaatatggcagaaggccaaaatttcaccatataaacacgccattgtgctgccatagcggggctcccttcagaaattgcttatagcagagggctaaaaagatgcgatgttatggtgttatgtggtactacaatggttatttaacaaccttgctactaaaaaacgacgtacaccattgcccaaaggctcctcgctatacgaaggtaagggggagggatattgtacgcagccttacccttgcatatgcaaagaggctgtttctggattcaaacccatgactcacaagtcaccaagacacaactttatttaaaaacattgctacattctagcaaaaataaatagattacattattaaaaaaaaaaatcactacagggtcaagaaaaacataaaatgatgaaaggagaacagtttaaaatccataaaaaaggatacatttagaaggcttttcaaacatgtttgaggtagattatttggagtgaaagaaacaaataatgatgttcaagtggttgcaatttgaaagatctattaaaaagaaaaatgtcttcatcatttcgtttaaatgacgctcaacaaagtgtacagctgctaccatgtcctttccttttcacaaagatcactcctaattatcctgtctcattaggatgttgcttagattatagtttgtgtgtgagagagaaagcatacttactttcactaatttttgtaattaaaccttcaacagttgtaacaattcctccaagggttccgcttgccagctccaagtcaagttcaggaacttttacacttgcagtatcagactaatcaaaccaaactactcagtcaattgatataaaatgcatatctaggtctcagattgcagaaaacattcaaatggtcaggcctatatgggtatcatcatgacatttttcacaggttatctttattagaaagacatgacgtgtatcattaccactttcaatatatcattgaaaacagaacatgttgatgtaatatttctaggatatcacttgatgaaaccatcaatttcaggcttctaataaccccaaaatgtgaatttgattctttaaaatactatttcatccaagtgtgatgacaaaataaattgaagaataaagccaaaattaaaagtggcactgaaagagttcacatgattagtttttttttcctcagttccttcaaacttccagaagcttacacttgtcctacatttgaaggctataacgtcaataaccagagtccaaagtactttcttttcttatgagatttcttttatgaatcccaatttgtagtaattacacattaaaaataagaaaaatgatatgctcacaaaatgcaaggataaactacaagatccattattcatcactaaccatacacaaattaacaaactgctgggttgaaattagttaagatccaagataaaattacagacctttattacatcacggctcaggtcattaacattcttcacattaagagtaattttttttcccttttcaggaattcgaccaccaggtttcaactgcaatgaagagaaatattttattccagccctcaaaatagagaactacacttgagaaatcagcatatacctcagagttgcggtaaccacaggaatcacatgtggatgccataacaattacttcttggaagtaaggaatatctgggcattgttaagatcaacaaaagtgtagaagaactaacaaaacatgttgctcaggcagactgccaataatatagaatacagaatatagaataggcacatggcatagtttaaaagagcatggcactgtttgatgcaagcaaatgaatattatctacagtctatactttatcaggctatcagcaaccagaatacaagtcaaccctgtagacaagtattttcattttaatctaaacatccaacattggtgttgagtaaacttgaatctatagccaagttcatgaaatttgaaaacaaagattacttccaggatttttaatagaacacacggttttcaaaaaaatattttctgcacaccaaagaggtggctaaagcttcaaatttcaactgaaatacatcaaagtatcaaacaaacatggaatcaaaaagaagttgaaacaaagaaaaaccagcccctacagtttatatgatgtcagatttcagttttaattataattgtcattgatgcaaaaatgacagactaccaaataaatgtaaaacagtcaaacaatatcccaatggcggtatgaaaaacgataaaaggatactggtgacaaacattcgagtttcacacctagtggcacaagcaccacaagaagttgggaatgtcatcacctgtcaagaacaagcagagcaatgtgacactgaatggaattttctccttaacaaaaaaggccaaagctcagtacaagcacgatacaattcagcaatgcatacctcttctggtgcagtatatcgaaataaggcttcagcaatttctgaactgttactctgtgcaatggctcgatgaccagctgttgcccctattgacccatgaggttctctcctcacttgatcagcagtcacgtctcccctttctggcgcttcatcatgagttccttcaatgtgagtggaaccaacaaggtatcccaatgatgcttgctgctcaggagttctctcataaaacttcatagtcaatgatggatcagatgatggcgcatacctgttcacatgtgtcttccatttaattaaaatagcagcagctaaaaggtgtgactaatgttagtaagcaccaaataaaggtaagattgccatgcgaacaaatacaggtttgtcttgactgatttaaaataagttataagatacattatggaatgatttgttttgcatcaattcaatacaacaatccatcaagccacaaaaatatacttaaaagaacatatttcaaaataatcaagttccctattctttctatgatagaatgtatgatgcaatatgaaactagcttttattctcttctagaagggtacactactcctaatcaaatctcttttgtacagcatcacttcaatcacatgtctcttcactctcttgtcaagttacagacagaatggagaaaattgagagactctttctttagtcaggaatgggggttaccaagagaaattatcttgttaattgggataaattttgcaagcctaaaatggcagggccttgggccttcagtaatgaactctttcattgaacacgccattcaacaaaagaaaagggaagaaaagatagagagctgcatggtgattacatgatttggcaacaactaatagttcagaactctagtccaggttaagcttcctatttcttctgctaagacatatctttgtattctgcttccttttcttctttttcattttcttccatttacaaagtcttgttgaaatatttgatggatccataaacactacatcacctgttctccttggaagtaattttagttggatcttactagttgtaagtgaatagtgatcatgatggcatgctttaattatttttatgattattactttaatttattttattatattatcaccatttaatatcttatgcatggagaaatatggaatttatattttatttaatcactcagattcctgcctttttttcaatttatttaatggcatgattatatctatgaactatgaaaaaagcaattattttgaatacattaaataacattgttatgagaagttgagattaaaatgtatgagattgagaatttgaccatttgaaatagatttgttactagccacgaattgtttttaccacttattttgggggtgggggatccatgatagaatcttacagtaacatctttctcctggttatgtactcggagaaaaaaggctatttgttagatggggacactagggcatggatgggatccaacgatatgatgtgatgtaataagacttgagaaaggaaaaggcaacctattagatggagtccccccgagtgctgttagcaaggtagagcctcagattttggtctcttgggtggcccatacaaaattaaaaccctcaacttctttacatttaacataatgttaagttttatttttacacatatttcaacccacacttgtaaaataaacactattatcctgaaaattgtcaacttgtaagcaaatcaatctgtgagctctgccaagatgaaaattttatctttaattttttttgtcatttacttatatgaggatatcttagcctctatttttataatctcttctctaataaaactactcttattatttattataaaaagaaaaaagaggtatgatctcttacgggttttcaatgaagctgtttccagcaggatcatcaagaataaatgtgaaggcagattccccttttgcacaggcttgcagtttcaccaggaactgatcaattgcctcagctgtctctggagcaactttctagaaggtaaaaagcatatcattaaatattattaaaagagaaacttatatatcaaataacaatataaagcagaaacaaataatactttgcgttcctcttgaagggcctgaagttcatcagctgctctcataagtatcccttccacctataaaacgcaaaaatgattttgttgtatcatctgactacaattgtttaactgttcaatgttcatgaattttcataaaatagtaaaaatactgtgagaactctgatacccacaacttacatttctagtatacatgtatgggcatcatccttgctactaaataacgggtgtatatagaaagtgccaaaattatgatatgattgaagagtcaaacctaaagcttcagaaatctacctaaaatcatacaaacaaaaactaatagactagaaaaataacaatgttattgttttaatcaaacaaacgttttgatcaaataaaaaaaggacacattgacgtgtttattcaccagattttaaataggccactgtgcatgacaaaaagaaatgcagtgtcgagaagagatttgcactgacaaatgcaataacaggtaaacccctgccctacccaggaaaaaaaattgacaaagcaaacctgtcaatgctaggaatgagaaaagaacaaagtatattgaaatatgtatcagaagtaccgttgacagactaccacgttgagcctctggtggaatttcaaaatccagttcaggtatctgcaaaatcatacatataagcaaggtgccttttgaatttattacacactgtacttaaaattttcattaatagaaccacaatagtcactcaattttagaatcaatagagatgactcttaaagtgcttcattcattaaaaaaatggtgctaaccatctatctaccaacctaactatctatctatctatctatctagcttaggccttgacttaaaagagacaagaaccagggtgtcaatgtactaaagggttttcgttaaccttatcatggctatcaaaataggaaaaagagtaaacgagttaaaataaatctagagaaaaaaaataaacaaaacaaatttgagtaccttaatggtagcagattcggcttttaccacttgtcgatttagcatctacattcataaaacttgatcaacaacacactcttataaacaaattatcagaaaagtttataaaaaagcatgcctgcaagtcaaaataacaaataacaggaataagagaatcccaagtaagcatacaatgacgatacaggtattagactgatattcaataaggctatttcctggaggttctctttcatgtaataacaccaatgtcaaaatagtttgttaaatttagtttctagacttttctaagtttggccatggtatgcattaatgtttcaccatgggcaattaactttatttctttccctattttgtatgacaaacacatatattatttgtttctgaaaaagccttctaaccatttataatcccagtttgactatttccttacatggaaagaaaaaggagaaataggatagcaacattctttccagtttccaccactgagatgcttatcatacttgattcagtaaaatgcacactaaataccaaccatgtcagttgcagtgtgttttcaattgcaaacaacaaaggcaacctaagacactaagactgacaaatgttgcaagcactgaggaaggaggtgggatgctgactgaataaagtgagaccccattttaaaaagggaaaaagttcatcataatgccaatctagaaagttcttttacaatttgaacagatgttactagaggagtgctaggagcacactctttaacacactcctccaaacacaccatagattggttaaaatttattgaaaactacaaaatcaggagaggaacattaaatatgatgtgggacccacaagtttttgtcattttcaattaatttcaaccagtaaaagagagtgcgttcctagcatttctcatgttactatcctaagatattccaagtctttcttttttggccagggtctgacaatggatgaaagactgaagaatccagctgtattctgcctcagcattgcagttcttacaaagtttctcgtgattaagttttgccacacatttgtatcattgtctgccatcttacttcaaatcgttttacatcattacccctttaagacaaaatgtcttttacgatgttcaactcgacattctacctaggatccggcggggcttgaaaactcctaacttggggatcataactaacattgtaagatcctatcttttaactaaaatgcaaaaattatacttatatataatatgcatgtgcataaatataccataaatttagaaaataacctctaactcagtattaaaacaaacttaaattgaaaaattatacttaaagcaagttataatatccaaataatcagaaatgtgggacaaagaaactcttgttcttctttcttttttttttttttttgctgataagaatgttgtgttgtttaactttttcttagaatttgggcttagggcctgactcaaccacacaaaactggctggtaaggtgagaattgcccaagctttataaggcactacttaagcctttgagtcaatgtggaaccatacccaccccttcacaccaataacaacaaaggtgcacgaggccacnnnnnnnnnnnnnnnnnnnnnnnnnnnnnnnnnnnnnnnnnnnnnnnnnnnnnnnnnnnnnnnnnnnnnnncctagggctatcggcctagagtcccaatgtaggtggcccgaacaatgaatccaagctttataaccacttaagccttaactctggtcgacctgagactacacccacccagtcacacctatcacaatgaaggtgcatgaggtctcaaactaaggcaggctaggatgttaataattaatgctgttttccaacaaagtttttaatgtagttctataacaaaaaaacctggagcacacttgagcacctccattcaagtcattactacaccatgttttaattcatctagggtctatataagttttcttatattataaataatgataattatttgggaggggggagtagaaatttgaatcaacacaaccttttgtttgcatgatgggatctccagagagtaacaacaaccacgcggttgaatttcaccagcaaactgtacttcattgttcctaacagataaaaacaataatttagaaaacaaaaatattagcttccaaggaagatcaaagggaccacttatgttcaatgcacagttttaaaaggagggcatagactaaagggttgtttacctctcaccacagtgtggacattcaaaagctgacaacaaaatctgcaggaaaggtaaatgtggcaatgggttatatttctagaaaactaatgaacagacataagaaacagcacttaaaaataacaatatgtgatcagatctgttaagattatatattctgttattatgattagatagtaattagtaattggtgttttagtcattattactcattagagtgatcctatgtaatcaatattgatcatatttactcattataaataaaggttatgtggtcatacagaaaacacaacattacggtagaacactattatatggtatcagagataggttatgcttgacagaggaataacgacagtggttctccaccaaggacctagtgtccccggtggaccattctgctcgcttcccatcttccagcgccctttctccttttccaatgacttttccagtgactgtcgacgccgccgtcacacgtcaaacaattttcttttctttctttctttcagcaagtgtttttctgttcgctgaacagtaatgcaaagctttgtgctgttcaccaccactgagtctttccttcgtaacccagtttttcttttgttttctcttttttgcgtagcccatcttcgcagtgaacagtactgcacgcctacccttgtttggcaaactttccgatcccttttcgttggagcataccttcgaccattgtgcccattgctgatgactgtcacactgtccacatgcgcagccaactcaaaacaacgccacatgcgaccccatgaagggtcttggtgcgtgaagttcatgcacacgatgcgtgacgcatctccggccagcgtcacactaatcttatctcactccacctcaaggcatccccgatggatcttgttgcttttttcacaggtgaacagtacctgttgccatcaccgaagacctccatgtcatccacgtgtgcagccaacttaaaacaccgctgctcacggcctcacacaaggccctagcacgtgaagttcacgcacatgacacgtgatgcatctctgacaagtgtcacattggtctccatcatcactgcaggccttcgttagctaccaccaagccatgattatcagtcgcaaccacatgacttgaatcgcctttagtttctatcgggttgactacatttgtaacaagctcaaccatatgctcgagcttaaggaggaggttaagattacatattttgttagatagtaattagtgatttagtcattattactcattattagattgatcctatgtaatcaatattaatcatatttactcattatatataaagtttgtgtggtcatacacaaaatgcaacattacagtaaaacactgttataagatccaacatctaatttgtgaatagtgctaatccattttaatttaagtattaacacaacttagattgtgtttggtatgaaaaagagaaataatataccaaagaaattttgtactttattccgtaggactcactcacacctcttatactctactctaattcaaaaatttatcttctatatctctcctctaaaccaaacacacccttaaggggtgggggggaatgaatgaaacataagcataaggagaggcagaaataaagatgaaatttaaaatacatatatgatatatcccaatgcctactgatgaaaattagtaaccacgtcaatcacaagaggaaatagaaagacagataagacatacctttctgaagttaggaattaaagtcaataaaaatcttgaagtcccctgacaaacatgaaataaatcaatgtcagatgataagtttaaggtgcatttgacttgttagctaggtaataaataattgaaccgcacaaaattattcgtttcattgatttttaacatggccatggatagaacaacacgaaagatgaaacacacaaaaaaattgtaaatattcattactcaataacctaggtgatagtgttgcttggaaatagattagtcccgtgaaataattgctctattatctgaatatcttttagtaaactgataaaagtaaatgattatttcttcaataagctgaacttaacaaatatatgatataacctctactcccatgcacaagaccacccattaacaccaatgaagaataacccaacccctgcccctcctccaagctgcttgtgcagtacatcaacccccataacaatagacaaaacaaacggttttgcttgtgctaagtgctctaaaaaattctacatgtacagtgcatcaaccttgtacaattgacaaaatattgttcatggtaagactaaccaattctatatgtgcagtgcatcgatacaatagacaaacaaaaggttttgcttgtgccaagtgctaacatattctacaagtgcaatacatctacctgatacaatatacaaaacaaaaagttttgcttgtgctaagtgctctaaccaattctacaagtacagtgcattgtcctgatacagtttacaaaacaaaaagttttttttttgtactaagagctatccaactctgtgtgcagtgcgtcaacatgatacaatatacaaaacaaaaggattttcttgtgctaagtgctaacctattcaacaagtgcaatgcatctacccaatacaatacaatagacaaaacaaaagttttgcttctactaagtgctctaaccaattctacatgtgcagtgcatcgacctgatacaattggtaaaacaaaaagttttgtttgtgctaagagctaaccatatctacttgagcagtgcatcgacactatacaatagacaaaaaaggttttgcttgtgctaaatgctaacctattctaaaggtgcaatgcatagacctgatacaatagacaaaataaaacgttttgttgctaacctattctacatgtgcagtgcatcgactctgaaacaatagacaaaacaaaaaaatttgcttgtgctaagtgctagtctattctactatactagtgcagtgcaccaacctgatacaatagacaaaatgttttgcttgaaactcaattgcttgtgctaagtgctaacctattcagcttgtcccatccttccatgtgcacacaacgtatacttagttaccaactcatacataatgaacatgtctaggcaaacaatctaagagcttaattaagttcccatcacatgagttgagaccttatatcatttgattactaaacttactctacatgtgcaatgtatagaccctgatacaatagacaaaaagtattgcctgggctaactgccaagtgctaacctattctatagtgcagtgcatcaacctgatacaatagacaaaacaaaaagtcttgcctgtgccaactgctaacatattctacttgcgcagtgcaccaacacaatgaaattgacaaaagaaaatgttttgatttttacttagttgtttgggcttagttgattgggattagttgtttgggcttagtaaaagagtaaaaaaaatcgagtgttgaatacgaattaaacgcattgacgtatggaagtaaaagtcaaagcccagtgttcaattttaaacttcataaacatttctacatcaaatcaaaagaactaagagggaaggagtaaaaaaatcgtgtattgaatatgaatcaaaagcaccgactctggaagaaaaaaagcaaagcttannnnnnnnnnnnnnnnnnnnnnnnnnnnnnnnnnnnnnnnnnnnnnnnaaaaaaaaaaaaagcttaacgcttaaacttcataaacgttgagggagcaattaagaggcaagaaaaaaggagtcaaaaaatggtgcaatgaatacgaattaaacgcacatgaataagaaaacaaagtgcaattcataagctttaacgttaaccaccgagtaataaagatgcagataaaaaaaagtaaaaaaaatcgtatattgaatacgaattaaacgcatagaagaaaaagaaaacaaagtctaatgcataaacttcataatagtaacgttcaccacctactcataaagatgcaggaaaaaaaaagagtaaaaaaaatcgtgcattgaatagaattaaacgcagaagaaggaaaaaaacaaagtgtgatgcataagcttcatagttcataatagcaacgttcaccaccgagtcataaggatgcaggaaaaaagagagtnaaaaaaaaacaaagtgtgatgcataagcttcataatagcaacgttcaccaccgagtcatgcaggaaaaaaaatcgtagcattgaatacgaaatagacgcagaagaaggaaaaaaataaagtgtgattcataataacgttcaccgactcaattaatgaatatgcaagagagagaaaaaagtaaaaaaaatggagtattgaaattgaaaagctcagttacaaacgcaggaaatgcgggaaaaagaagaaacggacacagtgaattaaagagaagcggaaaaaaagggggaaaagagaaaaatgttacgttttcaccgcaacgcatgcagagactttcgaggctgtagagaggagcgtcaccgtcgtcagcagaaacggcttccaccaccgacccaacgtccacaatttgctcgtgatttgcatccattgaattgaatttatctgatgcgtttcactttaatgcaaagagagagagagaaaaaaaaaaggattcgattttcaactacagtgacgaagaagagtttcctgaaccgcttggaaaaagaaaagaagaagaagaagaaagagaaaattgttgaatgctgttactagcgggttttgtgtatggggaagacgctagaaggaactagggtaccggtctatcgggttaagtttttcgggtcgggttaagatgttcggcccacgacccaagtcacatttttttgtattcaaaacttgaatttacgttgaccttgactaatcttaattagagagtgggcacgtgatctgcacgtggatgagaagcagtgggcctttttaaaaaatacaaaataaaaagaattaaatatgtttaagatctctcctaaatgatgaatgttgttctgacttcttaataaattctttaattattttgagtttcttgataaattaaaaattttgttttactttaattttcaaattttgtttcctaataataactaatgacatgaacttaaaataaatattttaatatattatacactcaaaataatactcctactaaatgttattttagtttttaaatctaatattaatattattttttcttttctatttaataaggttaattttataaattatcattatttttcattttatttattgatttttcttaatttgtataaaacattaagaagacacttaatttgatacgaaaataatatttgactactgataataaactaaactagatggtggatcttgtgttttgcataattattaggtttaattatataattggtctcttaattataattaaaagttcaattggatccttcaattattaaaatgttcaataagataatttaattatttttaaaaaattcaattggattccttaattattaaaaaatttaatcaggtccttttaattattttaaaaattaattaggtccttcaattatataaaaaaataatcaaaatttatatattttaggctaaaataaaaatttcgtcctcccctattttccaaatctctgattttagtcttcttattttataattgagacattttgtctctcacttttaaaaaaaatcacgattttagttcctatatttttaatcgagacatttcgtcccacacttttaaaaaatcttcgattttagttcccttattaatttgagacttgactatgtactttttttttaataaattaagcttgtaagcaattaaataatttaaaaattatcatttgaataataannnnnnnnnnnnnnnnnnnnnnnnnnnnnnnnnnnnnnnnnnnnnnnnnnnnnnnnnnnnnnnnnnnnnnnnnnnnnnnnnnnnnnnnnnnnnnnnnnnnnnnnnnnnnnnnnnnnnnnnnnnnnnnnnnnnnnnnnnnnnnnnnnnnnnnnnnnnnnnnnnnnnnnnnnnnnnnnnnnnnnnnnnnnnnnnnnnnnnnnnnnnnnnnnnnnnnnnnnnnnnnnnnnnnnnnnnnnnnnnnnnnnnnnnnnnnnnnnnnnnnnnnnnnnnnnnnnnnnnnnnnnnnnnnnnnnnnnnnnnnnnnnnnnnnnnnnnnnnnnnnnnnnnnnnnnnnnnnnnnnnnnnnnnnnnnnnnnnnnnnnnnnnnnnnnnnnnnnnnnnnnnnatcaacatttatataatacataaatcaacttttgaaattgatcataataactaaaattgtgaattttttaaaagtaggagacaaaatgtttcaattaaaaaatgaaaaactaaaattgaaaagtttttaatagtgagaatgaaatatctcaattaaataataggaaaactaaaatcgtggatttgagaaaatagagggacgaaatttgcattttagcctatattttattatagaaaaggacttaattgtaatgtttaaaatatttaaaggatctaattggactttcaaataattttgggacccgattgatgtattnnnnnnnnnntagttcttgtaatttgaaaaacgtttgtttaaatgcctctacccataatcctttatccaaacattgtcaaaaatgaatatctttttgtaataaaaatgcaaaattaaaatgaattgtcacctaactaacttctaattaattagccacgtgagtgaaatctctaacatggctagaaggactaaaacaagtttttcttatcaaattacataattaaaaaaaattaagactaaaaatatttttaaaaaaaattagagatgagaaacatatttaagtcataaattattaaacctattcttttttaaaaggaattatcaaacttgttctatttttttaggaaaaaaaaaactagcatttttaacatgtccattaaatggagttataaggttaactagatagtaaaagggaaagggaaatgagggaggggaaggtcacaaatttgattctcccaccaacaaatatatacttttaaatatgtaaaatatattttatttttaacgcataatttaagttataatatatgattttgttttgggccatcatgacattggctcaaactatccatcaattttgttgataactaattttcattggagaatcggttgaccacttttagtggagtcttccctctcaatcatatttttatccataagactctaccctaaaatttgacttaactaaatcgagtctcgtaccatccggactaataacttggtaatatatgactgttttttgtttatgataatttctttaaaatattgaaatttagtttagagataaaaggtgacaaggatgagtggttgtgataataaattgactagttaacaggatagcatgtgaaatatattttaaaagaataaagaaaataagagtttcattctcttaattgtgtattctaatttatatagaattcaagtttgataacatgtgcgaagtgatgaaattttaaaattaaaattaaaattaaagtttgtaacatggtatattttaaaataaattatattgagacaaaatatcattagataatacaaatcattaatttagtataaaaaataatcatttattaattttcaaaacaataaaaatcttgtacataaatgtaatttttgtccttataattcactctttttttaatttttgtccctataatttttttagaaaggttgttgacatgtctaacatcaacaagtgtcatatcaacaagtgattagatatgcaaatgccatgtcacgggtgtcatgttagcactaataggaatgataacattattatatctcttatcccattttgaatgtgtatattttgcccccctcccccccgtaacttagagtcttagatttgcaactggttataagtgatggtgtgacggggtttgaggattataccatggattaggccaattgtgggactttggagaaactacaaatcatggtgttaccatcacaaagccttcaaaccgagcaggtcatgtatgcatgcttttaagttagaccaactcttcaaaatagtttttttttccatatcactgcaattgtgactcaacattgtggatatgtaaaacatgtcctaattcatgttcatgtaaaagttttagaataaataaactagaccttcaaacaaggaagatcaagccttcaaaattagcttataacaagaaaaaagactaatttgaacttttgtacttctaaaaacttgctattacttatttattttatattagatataaagacaaatattacaagggaggttgaagtgtgattttataatttttctaaaactttttgacaaataaagctaacgtttgatataacgtttgaaagtagataacatgttttcacaaatagacactaccaaacgacaataacatattttgtaaaaatgtttcattgcacaacaaaatcaaattcaaatcctaagtcaattagcacaaaagatattgagatataagacatagttttatactgattcatttctaccactgagacaacgttcagtcttgacaatccactaagtttcaataactttaaataagttataagtattgttcactatcatttctgactcttacaacccaagcttatcaccaaatttaaaattaccttgtattttttgttcagtcaaatcattattggctctaaacaaatcaaaatatttgttgttggttggtttgctcactaactagtttttaacatcttacatatgattatacaacttaagcacttagtcttttcttgcaggatatacaaagtgttttgagagcttttaattttacgagtatacaaagatagagcttaggaagaggaaactagagattttgaatcttgagtaggttcataactttaactctgcaaagcttatcatatttatagggtattcttcatcaagtgattgttgtctttaaacaattatatttcttcattggatgttttggtttgaagaagtgtcccttaaagcatttaacgcagatcatctccatggtgagaaaccactttctttagctttcttgacgcatacttcagtagaaaatcatgtgtttttttgttaaagtaggtctattatagcatgcacagtagggtgcggcttttgagattgtttgaaccggaaagcgttgaatattctcatacttcttaagacttcgacagatcctatgaggaatatttttaagacaattctacaaaatgaatctcagacacaatattaaatgaagtcttaaatgcttcatcagagcttaacatttatcttcttccgtatgatgttttagatgcatatataatgttttcacctgacaacatgtaagacgcaatttttaacctctgtatttatttccatctaataaaaaatgttgagtgccccgattcatcttatgactcaacaatcttatgacataacatttaatatttattttaatttgtcttacaaatatgtcaatattttgctttaatccttataaattatacttttttttgtttctaattgattgtagattttgtttttttagtcatgctgacataacaccatgacatggcatttcttttgttaatatgacacttgttggcatcatcatttgttgaggttagcaacagttagccacatgatttgccattagtattttttaacaaaaaattactaaatgcaaaagaataacaaattttatggacctttttaaaaaaaattgaaggacataaattgaaaatcaagaaattatagggataaagtacctttaagccaaaatcttaaggtttaaatccaaaaacgggagggtaccacattgattgacattgggcagaagacaatccaaaaagcgaaggctcacccagctgagatcggcagtgagggatgcttaccttcttcttagagaaaggggaaaggggcaagattagataattttagtaatttttaaggtttacatcaagattaaataataaatcttttgtaaagttagttattgcaactccattattattttttgaaaattatttttaattttaagcattttttaaaacttattttaaaatgtgatcttgaagttgttgtccaactagcaattgaagggaggtagggatttgacccctataatgacatgatttaggcttggtgtcaatgtaattaggaagtttgtgtttcacaattatctagaggcctattgtaacacctaaatgggtattaccataaataacactacacttcataacaaatactagaatacactatataatataatatgtacataatgtttatgtagagctctaaactcaaacataactcttctctcaaataagtatctaagatattataccaatcttttaaaatgaatggtgttaaggttttacatatgaaagaccaagtcatatacacaaggggttttcataaacaaaatataacaccagtttctcaaaagaaagcctaagcgaatataaatatttaagcacaaatatttccatactcactacccaatggttctataccaacttaatatagtgttgaaaccaaagtcatagaagcgtcgaaactcattagtgttttgacaataatagagtttattgaactttaaagactaacaatgtgttatgtgtgctaacatatatgtgtgttataaaaatgttgctctttataacactttatgatgtgtgtaaaggactttagataaaattgtttttaacactaagtgtcttaagtgaatcagttggtcactagaagggggaagggttaaatagtgacaccaaaattgattagactattttttgcacaagcaccttcttaagcttcttttttgaaaattataagacttataggggtaaatcttttcctttacaagtacgtggataaaagaatatttttagagtaaaaaccttcaagtaatcttgtgttccattactttatatctaactctcaaaatcatatattttgttaaacaatattttcaagattttacttttcttacatagagtaggtgtggcttctaaataataaaacaaatttatgatttttttttcaaatatcaaagttaatcttttcaaaacaaggtttgtcaaaaataagttttaagtataaaacaatgaaaataaacataaagcaatggggaagaaaacaatcacacaaattaattatattggttctccccaacgtgggttatgtccaatacctgcattgtaggatttctccactaagaccaaacacctaaccatgatattctttgttttctgaagcctccacgggctcctacaacgagtattctacaagtctctgcatgcttcactcgagtattctttcgaaaagcttctttagacttcacccaagtattcttttgcaaatccctttgaggcttccttcaagtattctttcaaaaaactttttcaggtttcaccttaatattcttttagcctttgcagggtctacccaattattctttcaaaaaagcttctttaggcttcacaatcttacacaacacttgtgttcatactaaacttcagaagtagtagttctctaactactcttatgagttttttccctctaatcttaggggatgagctctacaccttttgggatgccttatacaaagactcatttgatgaatgtttttacattccttcaaattcgggtctattggatccacatagagtttttggctaaggaagttactaaggggttagctcacttgaccttaccctatctttttggcaccctttccttgcaagttgctcattcaaatttgatcaatttatatattgatctagatctaatcattggacgttgagttatctaagtttctgcatgtagtcattttgcacacattcaacctatttcttctaaaactcatttagttgtcttctttgtctttgcttttctccattgtcagccaacttgcattcttgaattttagattgtctttgttgaaggatccgttaagaaatatatgttgagtgttatttgttggtcttattcatggttttgaaacccgggttggaccagttgtttcgatcggaaactgatgcatccttaaatcgactctataataacctatgttttttataaaaaggagaaaaagaaataggaatttaaatttataaaattctgtcacaaaagctgtcgcaaaagccttagtaacagaattagcgacggaatagcgacggatttagcgacggattttcgcgacggagtctggcgccaagagcgccacaggtgctggaagttggcgccaagagcgccacagatgctggaaactggcaccgggagcgccaaagtggcgccaggggcgctagatgcactgaaaggtggcgccaagggcgccagaggtactggaaagtggcgccaagagcgccaaggtggcgccaagggcgccagaggcactggaaagtggcgctaagagcgccaaagtggcgccaagagcgcggcaatgtcggtcaggccccctatataaagggatttcgcgatttttctggaaaaaacactgttttccttcttcctctggcccaggcagccattgataggctggggaagctccataacttcatcctaactcacctaaacaccttctaatcaccctaaaacatgattaggaccttgtgtgaactaattccagccaagatttgagagaaaaccccatcctttgagaaaccttgaggaaagctgagtccagaagaggaaagaagacagcccatggatgctgaggcttggagtgacaatccttaggccttcctctacaattctgaggtaagaacttaagttttcactgggttgttcgtgatttgggtaatggggtgaatagtaaccaaattgtgatagggctggaattaggcatgggttctttagaaaaatatgatcaggaggttgttctgaggagtatgagatattgaaactggatttctgatgaagttgggttgtgaccctaagagtggtatgtgtaggaagaagagtgaatggataaggggttctgagatagaaaggaacccaagtgccttaataagaattgttcatgaggacaaataaacggtgaatatgtattaatatatttgatttggccatgtttggtatttgatgaattatgaacaattgggctattggatggatatagagtcttacaaagactctaatgccgtgatcaggcagagaatgatccctttgaggatccatgaggggcctatgaggtgaataggccgataactctaagttagatgagtgagggaattgtagaaaggaatcatgcttcctttcatttccatggttgagtaccgttgttaggtacctggtattgagattatgatattgactgtgctatatggtttaccagagggtgagacacgaggatgttagcagcatggacccaccagctgaagaatgaagataaagcacggtctaaccaggtaagttcagtgttcttggagtgatttccctacttgggggtcactatttaattgattatatggaatgtgaacactaggttagtgccccatccttgatattaatatggatatgatagctaatgtagttaaaccctaagatagaggactgagctgtcttgggtataagagatataccctgatgtttaatgataagatgaacactgtgttagtgttccannnnnnnnnnnnnnnnnnnnnnnnnnnnnnnnnnnnnnnnnnnnnnnnnnnnnnnnnnnnnnnnnnnnnnnnnnnnnnnnnnnnnnnnnnnnnnnnnnnnnnnnnnnnnnnnnnnnnnnnnnnnnnnnnnnnnnnnnnnnnntgatgaagacctgagagagtatactcaggcgattgtgatgagttgataaagaccatgaatgtggtctgtgtttgatgttagattgacactaggaaagtgtcgtgctttgtgttgattatgagtcttgttatgatgtgatttgagtatgtgataggtgtgcattctctggccagagaatagtggactatggaccccttggagatgtacccgcttggcggacgatccttcttgggataatccataggcgtccatgtaaatcctgagtagaggtacctgcgcggcagatgatcctattcaggtattgggcggcgagtcctgggtagaggtacccgctcggcggatgatcctaatcaggtactcagttggaagtcctgagtagatgtacccactcggtggatgatcctattcaggcacagatagagccaatcctgagtagatgtacctgcacgggcagatgatcctattcaggtattggatgatgagtcctgagtagatgtacctacattggcagatgatcctattcaggttctcagtgtggaagtcctgagttgagagattccttaggcaacatgtgttgaatgtctctatgtgagccgtaaagactgattataggatgaaatcctcatatatgagatcgagaacaatgggttctagaggatttatgattgtcagatgattatcctcaggctttggattagattacagaaagcctattgtcagagtaggtatattttagtaattatgagatgaggattaagatctgagagcttgagtaagtctattgctagacatctgatgtctcagtgcagaggttgagtatacaaacctcgtttggcttacatattacacagtatgacagagagatgataagaggaataggaggnnnnnnnnnncttactgagatctttatctcaccccatgtggggtttatgttgcaggaatagcagatagtagaagaggtagactccatggtgagaaggcaaaccagagctgagcattaggaactcgttggctggggtctgagagagttgagaccccgttatgtatacatattgaggtaatttctgtctcctgtcatatctatatagatatgtctgttatctgcctgtatttgattgtttgttttgattttgattatctggatcaataagggctagatgtagatatgtttgagttgtatttgtgttgatgttactgtaccatacataatgtaccaagaaatgcgattcttgtatgcttccgcagcgtattttatgctttctgatattataatcatgttaacacactgggtgcacacggggtgttacagactcaaaatcattgaaccggtcaaaaatcgataaaactagatgcgttaactcattttgtcgttttgcttaaaacttctattttttagagaaaaaaacttccaaaacaacatcattttttttttgtttttaaaaagaactgttgaacttagatattatgtttaatcgtatttgctttatgttgacatatgacacttttaagtgaagtttacttattattattattattattattattattatcaatttctgcacattattttattttttgttcaatattactatgatattatattaaaatataaaaataaatattttattaaaaccaattcaacctcggttaaactattgaccctttaaccaatgctttcaccggttcaatgatcgttcaattctaagaacattggtcatattagtttcacatgattttgaatttcaaatcatgggaattcttatagagattattttcccatcatgtcttctatagatgcattgttattgcagtgcaatgtgttataatcttacttctacttggttgttggttcgtagactaggacaactatctcattcgaatcctttgattgaacatcattaaagataataatgaacttgcaactttagaatcaatgttgtccaaacactaatgcatgtcttgactaatgtatttttttggattcataagacatgtctgtcttcgctaatcaacttgcaatgcaacttttgataatccttaagccatgtgtagcttctgataattgccatttgacttaagctacctgtaacaccattccttttatcatacacaacttccagtatctgtactttgatccataaaacattattgtcttttcagcttctgaaaagctctcattctagtagtcttattttttattgcaaaatctatgacattaaaagcttctttaaagacctattattcacacctataccatgcttatgattttgtctattcttaattaaaaacacttaaaacaataattagtagttaagttgttacttgcggttttgctttatagtggtttgtcatcattaaaacattagttttttggggggtggggggttgtctcaacaatgtctaatacacattttaaactatgcgttcaatgtttttcgtacaaagcatccaatacgtattattatcaaaaacattcaaagtttgttttcaaaacaagtttgatnttttttgggggggggggggggagttgtctcaacaatatctaatacacattttgaactaagcgttcaatgtttttcgtacaaagcatccaatacgtattattatcaaaaacattcaaagtttgttttcaaaacaagtttgattctctttataaatacatgaatgatgctttttttacggatgttgctctaaacaaaatgcatttcgaaaaacaacaaagttattattgttgtatcaaccttattattcaaatatatgatgcatttatgataaagctatatttgtctattttatgatactagttgaaggcatgtttcaagtcaatttatcagttcaagttgtaccttatgaaaaaaaaaggagaaaaaacataaaactctttcattaagttagtaaagaatttacacctttttggaataaattattagtacaccatatgttatacatttcctatctcctctaaataagacaagtaactctttttacgtgaagaatgtgtttatgcatttaatgcacaattataacgagaataagatccttcttaatgattatgtcttcaccagatatgaagagaagaatcaagcgtaaagacacagaaaactctgacaaatttcaagctctgatctttctaagtctcaaacattacaatttgtggacgttatcttaatcttaacttttcatacactttgttattgtaaagtttttgtatttgtgcttaaattcatattctctttgttgagaattatctttgtaaacctataaacctttatggtttgtgaaagccggaaaaggcttagtgttaaataatacatgggataagattatgttgttgtaatgcttgtaaatgttgataagaaaacttggttgtatctagaatttggttaatgaaaatccttttaaaggaaaacactagacatagtcttaaattgaagaaaaactaatacaaaaaaattgtgtttattttttttcccttattcatcttcatgtttttcttagtaaacactgtttgttttttcacttatgtatatttgttaaaaagtaagtacactagcacacaatttaatcccctttattgtgtgttagtgagacaatgtcttagtgaatatcttactactcaacaacataaacatatatcataaatacccaaatcatgtaaatattctttttagaaagttaagtttgcacatgaatggagaatacttgcttgacaaattcttgggtggtggaagtgctcgcacttaaagcaaataggatcacatttaatgtgaaaagctcatgcttagcatgtgacgatgaataacagatcaaaaaattataaatttacatcacccatcgcctccaatcctaacatggggtgacaaatgttagttgagcattttaacttaaccctactcacatttctaacagaaccaaactaatatttaataataatttttttaaccctactgagtgatgttaaacaacataaacaaaattcatagaatattttagctttaaaacttcttagcatatgaaaatggaataacgatttttagttaacccatttgttttggaattggaacatcattcaggaccataaaaatccattcaagatttcaccttggcaaacataaaaatcatggcagtaatgtgtaacatctcagcgtgtcaacatctcgacgactcacattatataatacttcatacacttccctcaattttctcgttggttagatttctacaccagtcagaatcttccacagctagtcctttctgagacatcggcaaccattctgattgcttttaggatcgttgactatctctacaaatcaatatgagacttatcaacatgctttgccttactcgcattttgaaaaacttcacaggaggttactcataccttgtaagttttttattgctattgaaaattgatggggaggggatgacattccagtctacgacagagaaagtctccgggcacaaagaacacttacgtaggtacttacatgtacctcactccaaggagacgagcgatagttcaaatttgtgacctaacatatttgtaggttaaaaggtagttgaaataactcttgaaaataaaataaaagttactaaaaaatttttttatcctaagcaagcttattttaataaaaattaacttatatgctactaaagttacttgctaaacacactcatagtttaaataaaaatttcatttggtaagttgttaattgttttagtaattttctaatatagttcaccttccttgtcataaagtgcattatttgatgattcctatttttaattttgtgaaattcattagtgactttcctttttatattgaaatttcatttgtctcaaatttaataactttttattttgaattaattattttaattgttaaaaatctccctaaacttagagttataaagttattttggtggttgaaggaacaaggtggaaagagaggttgtggatttgaatttctcctactaataaaaactaataaactaacaattaacatggttcaataaaaaaaaatctccctaaacttaaactactacgttttcttattaattaattatatgcatttattttataatttgaatttttctctttgttttaaatttttaattaaatttaaaatatttcatggagtgcattaaataatctctcatatattagcattnnnnnnnnnnnnnnnnnnnnnnnnnnnnnnnnnnnnnnnnnnnnnnnnnnnnnnnnnnnnnnnnnnnnnnnnnnnnnnnnnnnnnnnnnnnnnnnnnnnnnnnnnnnnnnnnnnnnnnnnnnnnnnnnnnnnnnnnnnnnnnnnnnnnnnnnnnnnnnnnnnnnnnnnnnnnnnnnnnnnnnnnnnnnnnnnnnnnnnnnnnnnnnnnnnnnnnnnnnnnnnnnnnnnnnnnnnnnnnnnnnnnnnnnnnnnnnnnnnnnnnnnnnnnnnnnnnnnnnnnnnnnnnnnnnnnnnnnnnnnnnnnnnnnnnnnnnttttgtataataaaaaactcattaatgttttgtttggtaaggaagaaatagaaaagatggaatatgtgaaaattatttaatttttggtagagaagagttagcgtaaaaatatttttaaaatttgtgggattcattatactatttttcacatatttttactcacctctctatatgtctcattgtatcttttttatttctcttcaactaaatatttttttttactttatttttaacatattttcactcattcatttgattttcatccaccttatttctctcttttttaccaaataaggaaaaaaaaggtcttacaannnnnnnnnnnnnnnnnnnnnnnnnnnnntacttaaaataggataaaacatattttttgtctttataaaagataaaaatttgaattttatctcagcaaaaacttttgttcattttttgtccttataaaattataatatgtcaatttttatcccgaaacaaggtttggatatctgaacttttgctataaattttggaagttaaaaattgccacaaattccacaaaaattgccataaattgaaaaataaaaataaataaaaatgtaatttgtgatactttttctacaatttgtgacggtttttaactctcaaatatataactaccaaaaattgttacacgtaggttcggatgtacttgaaccttgttctgaactaaaatataacatatttcaattttatgaggaaaaatgaacaattttttttacagtgatgaaatccaaaacttttcatattttataagaacgaaaaatatattttaatctaaaaaatattataacatttttgggtattacaagcatagacaaaagagccttatacaaaaacaaatctcaagttaactttcttgatggaggtccacacttattttttaattatattaaatgtattgtttgattttattacacttatccttattttcatattttacatcagttacatattgaattctccatacacatgtcaaacacaattaatatatgtaacttgtatgacatgtataaagttggttcttttaccaatttagagtcatcatttcttcttcctaaacaatgtgttttctctctctttcaccacttctcactttcacgatggctcccatttcgacagaagagcttcatcaatttcacaaaactcatcgtgaggtctttagtttcctagtgttcaaactacatcgtgaccttgcaaagtccttactagtcatggccttatggatttggctagaacaccatggatacccccaaatcacctatgaagtgatgggcgcatcttacacttttgtcaatggtcttgttgatgaagctgtctcttgtctggaatgcttagaagaagaaaattttgccatcccaaataatggtggatttcccttaacaacaaggctaacaaaaagtggagtatctatgaaaatctttaagcagaaaaggtacaccataatagccggtatcaaaagtgttttgaaaaatatttgtactcgaattttttctgatcttgtgcagatagttctaagaatcaatatcaacagagctggtacatcacaaggtaacatatcacatatacctatgactatccctggttttccgcaccctttgtttggtacctttgatatggcaccaatgaatattgtgaacctagacttgtttgatgagcgaatatggacaaagggcccctgcgatgatgttactcttgatgataaatccatgtttgtaacattttctagaggttttccagtgtcaagagacgaggtgataaaattgtttacatatgcatatggggattgtttggaggacttatctatgggaaaccctgatgcaaataaccagtctttgtttgcaatgctggttttgaaaactgtggaaacagtcgatcaaattttgaatggagaacgtgttgcaaagcttcgaataaatggaaaacacatttggattcgcaagtataagcgtcgtgactgaattatgcttatcatctaaaaaatctaataaataaagttagaagtcaaaggcttcaaccaactagatatcatgtttaccttgtttttattttttttccacctcgaaacttatctttactttctaagtgaaatcttgcttaattgttaatgactaataattatcaatcgtcatatttagtatcctttgtgtttttatcaacttctaaatttgtaatctatgttaataagggatatgctataattacatgtattagtaaaggttaggatgtaactcttaactgtggcttcaaaacatctactctttatatgcaaaccttgattaaaactccaaaacatgactttaaatcttgtagtcgcaatttggtaaaattgagattttttttgtagtgaaagggaaatcagaaacaaacaaaagaaaataaactacacatgagggaacaaaactcctcttgcatcagtgttaaggagagactcatctcagaatgaacactatcaaaaagctaaaatagtaaaattaaaatttaatttcatagttaaaaaattgataatcatcaataaataacattttttcacatgaatttgacatttaataaaatacaattctttccttttaattaagttccttaactattaaaaaaaacaccacacaccttttcaagatatacaataggaaagatagataattttataatgcttattagattaattaattacatttgacaatagaatcaacacatatttgaatttacctgatctacttacattcaaaaatcacatctttgtctttgataatttttgtaaaacaaaaataagaaacaatttaggatgttatcaatgctttgttaaaaaataatatatatgaacttccttctataattatggatggtttaactagtcacttatgaatcttgaaaataaataaatgaataattggctacctaacaaattaagtttgaaatgtaaatttatttttaaaataagttatgtgcaaaaaacatgaatacctacaaagagtaaacaaatttgctaatacaaatcatattgatgtaaaatttgatgaataaatcctgaaaattactttctcaaagattgatttaaaataaatgcttcatcacttgattttccacttttatcttttaatttattatataataatacaactagtggtgcaatggtagaagttgttttttttgttaatgtatatttaaaataaaggaatattttttgtgaagaaattttgacaccaacatttaaaatatgttcacacatttttccttaatcaaatggttgaactaataaatatttattccttcaaaatttcttaatcttacacactttataagtcattaaattatttcaagaaaaaatatcatgctattaattatagatatgaggtttgagactttgtttcaaaggattgggataagacatgtgagattttttactttttgatctgtaagtttaagtgataaaaattattcaagctattgacgataatttttggaaaaatatttgacattcaaaaattaattttgtaccattcatgctatgaaacatgatagtgacagtgattgtgtgttgtctctctcttgtcaataatgtaacatccctaattgttgactttttagtagttcacacattatgatatttcacatggtgacactacactaagcatccttggcagttagaatcatccaccgattagaatccttcgtaactagccattttctatatctcaacaataagctctaactactttcagaaccaatggttgtcccacaaaccaacacaactttttaacgtgctttatcgtcactcacatatttttcgggaaatttttccaaagatcacccatttcataattgctcaagccaaacacgcttaacaataaagttcttaaatgatgagctaccaaaaagtacatgcatcttgttgatataaataataccaactaactccgttaatattcatatttaatatatttgaaaaattaatataagaaatagcttcatgtcttgaaaatgtttttgtaaacatcatcaataatttttccgttagacttcttttattaccacaaccttgaaagaatgtcacattcactttaaggaataatgtggagctagttatcaagattttttctctcttaaaagttcattattttgtttaaccataagtaacaaaaaattagcttaatatacttggtaaatcaaggcatgaagagtttaatatgcttttgtaacacatcttcatcaataattttctcaccatataattttaattaagaactaatctttaagaatatagtaataaattatattcacttatagttttgaattttgcaattacagatatagctaaatatgtcaagcatatggaagaatcttattttatttttggtttgtatctttcattaatcactattccgaagaaataatgattttcgctagtaagttacttgttttcaatttctcatataaatgacggtgaaagaaaattattgcttttacgcaatcttgtaaggatgtctnnnnnnnnnnnnnnnnnnnnnnnnnnnnnnnnnnnnnnnnnnnnnnnnnnnnnnnnnnnnnnnnnnnnnnnnnnnnnnnnnnnnnnnnnnnnnnnnnnnnnnnnnnnnnnnnnnnnnnnnnnnnnnnnnnnnnnnnnnnnnnnnnnnnnnnnnnnnnnnnnnnnnnnnnnnnnnnnnnnnnnnnnnnnnnnnnnnnnnnnnnnnnnnnnnnnnnnnnnnnnnnnnnnnnnnnnnnnnnnnnnnnnnnnnnnnnnnnnnnnnnnnnnnnnnnnnnnnnnnnnnnnnnnnnnnnnnnnnnnnnnnnnnnnnnnnnnnnnnnnnnnnnnnnnnnnnnnnnnnnnnnnnnnnnnnnnnnnnnnnnnnnnnnnnnnnnnnnnnnnnnnnnnnnnnnnnnnnnnnnnnnnnnnnnnnnnnnnnnnnnnnnnnnnnnnnnnnnnnnnnnnnnnnnnnnnnnnnnnnnnnnnnnnnnnnnnnnnnnnnnnnnnnnnnnnnnnnnnnnnnnnnnnnnnnnnnnnnnnnnnnnnnnnnnnnnnnnggcactttaaagacacttgaaaataaaaatataaagttagatatttacttaaaaatttaaacaataatatattcatatatcatgttttagaatatgaacaattatttactttgattgtacaagttggaaaatataatgcatggtagattaagcaaatttgtaacttaaaaagaatcatgaaggattcgctacattgttagaaacttattcatattgataacacattataaatgaaataaagagagaaagtataaaaaaaagattaagattaagaaatatgacaactttctatcattttttcatacttttgccagataacattctgttaataaaataaacaaatgtgtttcacttgttaatataatgcatgcatcattatatacaattattacactttaattattcacatgaaaggttgtagcaataaacctttactaataccaccttagtttctaatctcgatactattaatcacgtgtaaaacatgtaaattttatatttatcatgattttactttggttggtatgattgatgaattttccttaagggatttgatgtattgaggcatgtggaagtattgttgttgcatttattgtgttatgattggttgttgggccattgatggccgaaggagaccttgggtttgtgttgttacaatttgtagattgtactttcatacaattatgacaccgggcttgaaatcatatgaggcctctattgtttcttagtgtgtttacactaagcgagggaactactctaaacgtgtcctacagtgccatgagtttggaaactattaaagaagaagtcccaaatcgttgcatatccatactatgcacatacaatggtgtgttgataatgagtttaacatagaagaaatctcaaatttttgggctttcacactaacacgcctcttaatgtgctaagtgtgggacttccaaaaagcaagcattaagtccctatgcaatgacttaagtgttaggatctcacgcattaagcataaattcattttctaatagtgcttgtgacaaagactctatctttaacataatgacattgttggatagacttttgaaattgaaggaggctcttcaaatgttgaagtcctaattggattccttacgtttcaaacactttcaattttcatcaataggcctctttattcaatcattgatttacttccttccactgcattaattttcatatggctttatatatgttaatttggatggtaatatgagtcacgaggaatactttttcccttctacatgcctttggtggtggaagatgaatgtgtttgaagatgaagatgaatgagcgatactagtgaaatttgagaggtatgagtgcgactacacaagatttttttttaaattaagcactaaattacacacacacgcacacacacagacacaaaggctcaatattagtaaagaagatagtaaaattagaggtaccctcacacacacacacaaagactcaatagcaggaaataagatagtaaaattagagatgccttctttgatagtaggcgaggttatggcattttccattcctaaagaagtggtgaacaaccctttgaatgagagggtatataagtatgagatcatgatataagaatgaagtgatgcttcttgaaaatttgactcaatactttgttgcaggataaaataggaaaagataatgttaaacatctaaaagttaatgttatatgtttatgaaattgtgtagcaaggttttatgtaaattatgcattcacaactctttcatagtttgttgcatgtttatagtactcattaagacatcgtctcattagtttaatttttatgtttcagatcgaacaagtatttaagaggacatgagatgttcgtggagatacttatgttatattttcttaggctaactttttgaatgataaattatgtattcaatttatattctatgtatacggaccccttacacaaagggaattacgtacccttacgacaagcatatgatgatcctatatgttgttttatatgtgtatttggtatgaaaaacatgcatttaagataatgctccttagagtgttacaaattacattgtttatgtgacatatgtatttgattttaaatgattaccttgtnnnnnnnnnnnnnnnnnnnnnnnnnnnnnnnnnntgtgtttttgtagttttaaaatatttctaaaggataatattgactttccatactataaatttaagattttttattgtagaaaaatatgtacgtaattagattttattttattttataacacatgtcatatgattttttatattaattaaattgttgaattaaatgagttttttaatttttaattattttaataaaatttaataaatttcaattaaaatgaattatagtaaaacatagtgaaaattttaaagtgaaaatattactttctctattctaaattaaatgatattttagcattcaaaaaaatattttcatatgattaatgttttcactcttcaataaaacttctattctaattttatactctaataaatatttttgtcttaaaatatttaataatgtattatggaaattaataaatccagtaaaaatattttaataaaactaatatctaataaattattgtctcaaaataattacttttcttaattatatatataatcttaaacattaatcaatttgaaacgaatagaaaaggttgcattattttcaaatttctagaaggaattttcttcttctaatgttttcactttatagacgtactatattttttaacacgtaaaaaaaatctaaaataaaaaataatttccatttctcaaaaataaaaaatagtaaaataggaaatatatttgcaactaaagaggcactttcacttttttgtgagagcatcattcccttccattgagagagagattcagagagagaatggagagtagcgaggaagaagatgatttcccttccattgagagcatcattccccaatccaaggttgactctctctatcagtctcacaccgaaaaggttcgctctttctcttccttcttttcgcaatcannnnnnnnnnnnnnnnnnnnnnnnnnnnnnnnnnnactctgaagaaacctttttttttttttttttcaggggattaggaagctttgctgtgagctcctagatttgaaggattctgtggagaacttgtgcggcaatatgcactccaagttcttggctttcttgaggtaaacattttgggtgttgttctgaatcacaaattgtttgaagttacccacctaggaatttcatgacccttttataaattggtgtgccttttgtctatattgcactgttacaagttcaagtccagcacacagatatgggtatgatgggtacaatgtttttaatttcaatggtgtattgtgttttggtcatgtggccattagccttgttcgtgcagatttaactttttgcgctaactaatatttgtttcttgaatcaatattagaaggtcatttgttttttgattctgcagtagaatcttatttctttgattggtaatttcttgataggaatttatctgtaagttttatagttatttttcaaattggatttggaagaataggagacatgttgattagaataagccgtttaatagctgtctcagaaaaggggaaatggttaacgtcttgataggaatgaaaatgggagtgaaaattcatagataagttatagtaaagttgtattgagagttgattcatgaatttatcacctcctttctaaccccccataccaaactgacataaaagctcaagctgttaaaatattacccagtaagttggttatactttagtatgctcaacacaccctgatacatgagttatttttgggtttgaacttgaaatgtgcacaaagcactagctctcttctctaccttgtgctgaaatttattttaattggggaataggtgtgaaaaggattgaacacttaactgtgtgggtgaaagaccaagcttctcaaaagcttaaacttttagtagaaggcctatgaatggttcctattttaatatttctgacaagtttgcaacctgaactataaaacaacagacttttgtaacaattcaaaccactttcttcaaccatattatatgcattcaaattttgttgtttgttcttgatattgtaggatatctgaagaggccgtggaagtaaagcatgaattgattgagctgcaaaagcatatctcagcacaaggtattcttgttcaggatttaatgagtggtgtctgccgagaattggaagagtggaatcagtcaagcaatgatgttgctgaatttcagcaagaacctgaactacctgaactccttgagcccttaccaaatgagagaaatgaccagaaaatattattcttggaaaacattgatgtacttttggctgagcataagtttgaagaagcattagaagcattagatgctgaagaaaagaattctgcagagttgaaaggctcagggaataactcttcagatgatgtttcctcgtacaagtctgccttgttggaaagaaaggcaatgcttgaagaccagctggttggaattgctgaacaaccttctgttagtttccccgagctgaaaacagccttaaacggtttaataaaacttggaaaaggtcctctagcacatcaactaatgctgaagttttatcagtctcacctccaaaagagaattgaggctttacttccctcaagttctctctgtcctgaaacatttccttctacattatcaaagattgtgttttctgtaatatcactgacaataaaggaatctgctttgatttttggagataatcctgtttataccaacagagttgttcagtgggcagagtgggaaattgaatattttgtacgagtggtgaaagagaatgcacccttatctgagactgtttctgccttacgtgctgctagcattggcattcaggctagtctgaactactgctcaatcttggaatcacaaggattgaaattgtctaaattactgttggtgcttctgcgtccttccgttgaagaagttttagaatcaaattttagacgtgctagaagagtagtacttgacatggctgaatctgctgaatgttgcccgttgtcaccacagtttgcatcttcgctttctacaatagctagttcatctagtagcatgcttgttgagagtggaatgcgatttatgcacatagttgaagtaagtactatatcatataaaatggctattttcaaatggacaataattatgttattttgcctacgcactcttttctgtgatgtaattatgtaaagttttgctggataagaaaagcctttgctttaaattttgtcttcgtttccttttccattttctccctactagctctgctatatgcagcatactgttgaccctcatctcaacaaaatatgtaataaattggtctgtttgataagaaactacatatataaggttttagacctttagtaaatgttccttgatatccatgatcttctttgcatgaggaattaactaaagtattgacagttgatgtgtaactagtgctaatgacagtgcaacatatgtgcatacttttgcgataatgtcaatatgttccttttctgtatgttcacttgttttgtttatatcttattatgtatgttaaagagattgtcttcacttgagtgcaaatgaatgaacttgcttgtaatttttctttgtcttgctataacaggagatattggaacagctaaccccaatggcttgtttgcatttcggaggaaatgtactgaatagaatcttacaactatttgataaatacatggatgctcttatcagagcactaccaggtccttctgatgatgacaatcttccagaactgaaagaggttgtgcttttcagagctgagactgactcagaacaacttgcaatattgggaatagcatttacgatattggatgaactgttaccaaatgctgtgttatcaaggtggatgctgcaaagtgaaagcaaggccaaggaaccaaatagtggagcgacagagaatgtaacctttaatacaaatgctagtgtagaattgaaggagtggaggaaacatcttcagcattcttttgacaaacttcgggatcacttctgtctgcaatatattgttactttcatctactcaagagagggaaaaacacggttgaatgcacatatttacttgagtgataacagagaggatctttacttggatactgacccactgccttcacttccatttcaggtcattattcttatttttctgcttttgctgctgcccttgtttttgttctctatttgtttctttgatcatccctgtgcgtttccatgtttcctttttggtaatgttagctgttgattgcatgtttttagagtcattattagaaattgattttctgaatgaagctgtggctgttatttgctcactaattcgataatttcttgcattatgctattttactgaagtatagctatattttcaggcattatttgcaaagctgcaacaattagcaactgtggctggagatgtattacttgggaaagagaaaatacagaaaatgttgctagctaggttaacagagactcttgtcatgtggttgtccgatgagcaagagttctggggtgtattagaggataagtcagctcctctaaagccacttggtttgcagcaggtattatatatatatatatatagttatatataattgaacacttttatgtccaaattctgtcatccaaaatacttttaggttttaagctttactcagcacagtcttgatgcatcatttgtagaatatttggttaaatcaacattttctcacaaatagtgtcgtttatttggcttgtcaaataaataattgtgatggttatcatgggagcctttgattgcatctcgagatttgttatcaaccacaattgaagatataatgcatttcatttatcattcattcatttggtgttatgtcttcagtatcattatgcaataaaacctatgtttttggagaaaattacttaatatcatgctattattgctctttcccattggaaaaattgttatagagaattattctctttcaatttagtttggtaaaattttgtggatagggtttctttctctgcactcctctcaaccatagctgtctttttgtgacagttaattcttgatatgcactttactgttgaaattgctcgctttgcggggtatccatctcgacacatccatcagatagcatcagctatcactgcgcgtgccattcggaccttctctgctaggggcatagatccacaaaggtattcctcattctgcatttagcattccctgtcctcagttgtattatgttccggtattctaacaccaatcatttttcatgatcaattatcagtgcacttcctgaggatgaatggtttgtggaaactgcaaagtcagcaataaacaagctcttgcttggggcatcagggtctgaggcatccgacaccgatgaagatcacatcattgttcatcatgacgaagttgtctcagactctgatactgtttcatccctgtcttctatggaatcaaccgagtcttttgcatctgctagcatggccgaacttgacagcccctctaacttgtctgatccagataattgatttttttttcttctagattatttaaaatatagactagttgtagtttgagattttgagaaaaatgtaagtgtcctcagttatcaaatttgcaatgtcatggcatattgtaggacatgttcatagaccttgctaggggataggaagatcccttggatttaaattagagttgaagagtaagtgtagattgatatcttatgtgtatattttgaaaggagggtaaggtggcttgggtttctctgttcccgtttttttttttttttgattgatatttttggtcagcatatnccgttttttttttttttttttttgtattgattgatatttttggtcaacatattttgatgatggctctttctttttgcacattccgtttttattccccccttttattattttatatgtctttcctctcatccttaacacctcttcccttaatccattaaatgcgtttcataaaatttattgaatgcattaaatgcgtttaataaaattaattaaatcaaaaattcatttatgaaagtatattnnnnnnnnnnnnnnnnnnnnnnnnnnnnnnnnnnnnnnnnnnnttttttttttttttttatactgagaatgcattaaatatgttaggtaaattaatttttgaaatgcattcatattgacatttactatatgataaatgttaaccagtctctttacaacattgattaaagaaataaaaggagattttttgttgttgcaaaaatgcatcttcaaatggcgttaactttagtctttttgatgaatcctcattcattatgattcattggaaagaatgatgtggttttatgtatcttctaccgtcaacttcaataatttgatgaatccttattcaatgtgattcatatgaaaaacatgatgttgcatcatgttatgatgttgtcaactcgagtcttttgatgaaatctcattacttgtgaatcatatggaagatatgttgttgctcaattattatgatgtttcaaacttctgagcttttctgcatatgatgttctgcattgagaaagttttctaacgtagatgaaaaatcattaaatgtttttcttatgggaatatttgatgagataacatgataaacttgtattccaaacattctaatgtgcgcttgttgcaacatgttatgtctactagtgtatttgatttatttgaccctttggatgaccaaattggccttctgtcttcacgagaattgttgataattatatccttgacatttaagtacaggccttctatttctgaacttgttggtttctcataattgttctattgagagaaatgttcttcttgtccttgagttggtgattccttctcatatatgaagttttctcttcattcaatgagttattgacttcattgcagcatatatccaaggacatgggtcttctttttgagctttcaagcatgtcatctttttgagtgactcatatcatccctttaagtatatttcaattgttgttattttcagaacctatacttttgaatacgcttaaaaaaaactcatcaataggcttagatttagaaggcttatgatttgggttcttagaatttatgttcagatgggttgtaagaatttaaacacaaaaagagttgtggactctatgtacatgataaaaacttgtgttgtaacttgaatgtttatcttctccctgtgttataccttaatgcatatcaaccaattcttaattgtgaaatctttaagaatacattttataatatacacaaatctttatataatgtttaccattgattttttcttcttctggaatttagttttatactacatttatcataagaaactcactagtattggcttagttgtaagagaaattagcaaacttaattaaagtcttaggttcaaattttagagttgccattgtaaaaaaaaaatatcctaaacattgaacctgatacaaaataaaatagagatatcgaaaggtccaatagataagggtttgtgtaagataatacacaaatttcccattaataactactagtatgtttaattctttcattttttttatactagaaatattataaaaaaaaactcgcaagaacgtgcttagggataaggagaagtaggtagctcacataaaattttaggttccaattttagtgccaccattacacatacacaaaaaataaaaataaaaataaaatcctaaaccctatacttaggggtggaaatagggtgagctgatctaagctttgctaggtccgagcttgacttggattaaaagtggtcttagcttgatctgtttaccgtcaaagactttttaagagtttgagactcacctatataacagccttgcatgaactacaaacctgttttaaaggtttagtttgtgatattttcacactaagataaatgtaataatatgcatgtgagactttataaaaataaaataaatagactttaatttacaaaaaaaacattgtcttgatctattttctaaaaaggcctgatttggtttgacgtgatataggttaggccatagacacctgtcgatcaatttaacctattttcactcctacttaatgtactccatacaaattaaataaagataacaaaaggtgcaataaatcaagagtttgtataagataatcaagtaattttctatcaagaactactagatatattcttaaaaaatgtttcattatcatatctaatacttattaagagaaacttatcatttaccatactccataatactaccttatacatacccttaaatcaaagattatcttgctcttcaacttcctgattcacactctcaacctcattctcttccaaagaccttcccatggtttccctagtggaaaagtaggtgatcaccattcccaataagcacacccctccaagtataataagggacactttcatcccaatccccttagggtacccattctccttctttctatgtgaagccaaaagaaaccccaaagacccaataattgccccaaccttgccaactgccccagaaatgccatgacaacttgacctaaacctagcaggaaaaagctcagccgggactatgaaagtggtagtgttgggcccaaagttagcaaagaaaaaagcaagcccatacaacaccatgaaacctttattcttattatgttcctccgtggtccaataagagtaatagggaatcccaatggcgaaaaaggccaatgccatgaagaaaaagcccatcatttggattttgacccttccccatttatcaatgaaatacattgagaagaagtagccaggaattgtggaacaaacagcaataacggcttggatccatgcagcatggaaagcatcttgatacacattcacgtccttatttttttctaggtagcgtttgtatatttcactttggaacaagacttggctatagaacacaatgtccacaaggaaccatgtggaagaacatgcaaataggtcacgaccgtgcctccgcaagaattcccttgaaagtagagggtaaggatgtggggttggtggcaaaggatgttcttcagcaatctggctcagtgttacatcaaggactttctccatgtcctttgctgcttgcatcacattttgctccactaatgctgtgtacctaatgattgcacatcacaatctttagttaagaaacataattaataactcaatatcttaatttgtattgagattattgtgagtttaattttaatatcctaattatgtaaagattgactattaattaaaaatagccctacatatataacatttaaaataattattataatgaaaaaaagattatacattaataatttaaaacattttatatcgtgattcaattataatctataatgtatattaacaattatttgtgattgaataataatataatcttttttatattatcactacataatcattaaactctattataatagccaacaattatacaatttatgatatcattattgaataacattaaaaacttttttttaattctaaattgaaaaaaaaatgagatttaaagttgaaatcgtgtacaaattatccaaatttcactgttaggtcgagtttagtgagatggagaattttatggttagattagattttaattgaattcttattttttttaaccttagtataatacaatatatgtgattttatttattgtatctggtcccatggcgcacagttaattggtacttggtgcgtgctggttaagacaaggcataaaaatacatattcaaattcagaaatgcgttgtttatgaaatgttttgactttgaccaaaaaaaaaaaatactcttactttttcctaaacactatgaagaaggtatttttttttttcattcaaatgaaattattgtttttaaattatttttcaacaatcttacccaaataaaatttgattatgattataattgattataataataataatcaattatacatatatttgattattaaaataatataattttcacaattattatttttaattatatattcttgcctttagtcaattcctaaaaatcttaatataatatatttattataaataagacaaataatggttgagggtggttaaagcaataaattcaacctaaattcaaacaaacgattgataatattttgattttttataatatcaaacatgaattacgcgagctccttaaacaactctataattaatcaaccttgccattttttcttttcggctaacgcaacctggcattcttttattttacaggtgcacgtgcggttcttggtctttttggtgtaataaacttgatttgataaatgcgaaaatttcaacgacatggatgatggacctgatgaataagaatacgaagccatagggttccttcaaactctatttttcccttgactaaaacaattctaattaataagtggctaaactgaataactgattccttgcacgcccaagacaaggactaatatgtgcatacacaaaataaaatgagttacactttttttaatgaaaaagtttagttgagttgagttttgaaaatttattaatattaattaggacatacctaaaaagacttaaaaattgtttatagaaatacatacacattattgattagcaaagattgtatgactagttatttaagttagtttttaatttcttttattagttgataaacttatttacatatttgaaaataaacattttttaataacttcaaatatttttttaaaacgttatttaaaatactaatttttaactttttatattttcttttctttttattcttaaaaatatttattaaatatatttaattatacttgttaaataaaacataaattatttatttatttttcactcatttcttctacatgattttattttaatcattgtactatttataatacttactttagtatttcaatattatacttcaataaattgacaatgataaatattatattttattttaatattctattatttttgaataattttaatcatataatttattagactcctaagtaacgtgagaatttgtgattcttagtcgagattaagtgaaaaaagtgacctacaagctcttcattcaaggttaaagggaaagagtggattagactaatatcaatgtttcaacctcaaattannnnnnnnnnnnnnnnnnnnnnnnnnnnnnnnnatgaaccatctctaaattaaactcttaaccgatatgtaattttataactattagaacataactattaatataattaacgcaatacaagtgatgatatcatccatcttattttatgttttttcttatttacacactaactgtgaaagaaattcaacaaggataaacatcagctcgtctttgtcaattccgttttatacggttctacaccagaacaagcaattcattatataaacacagcgagacaacatccctttcactcttattcaattaatggacgcaagaaattaaagcaataaataactgatgataataataacaagagtttaataattatattcattttattccatcgtctaatcataaattatttttaaataattattttaaaaatgattaaatttaacatatacgatgaactataattaatatgtataaaactttttacacagttaatacataattttttttcataataataaaaataaataattaattaaaaaaaatatgaacgtggaaagtgaagaagtcaatggaagcaggtacctggcggtttcgggcatcatcatgcgccagtagtaagtcatggctgccgggacagaaccgagcatgagaatcagtctccatgccacgtcagcctcggaatgcttggacgctgcgcggaatatggagcacactgccatggtcacggtggagctggccaatatgccgaacccttgcatcgaaaacaccgccgctatgaacgaccctcttgtcttcttgttcgcaaactccgacattatggtagcagacagagggtagtctcctccaatacccagccccaagaaaaacctaaaccaaataaaccattgccatatttaacaattttataattattagtgctacttattaacaaaaactttacagaaaaaagattctttttatagactttgctcaagtcagataacattaatctacatgacaaagtttgcactctaaatgtttaacaacttgtataaaaatgtttttttttaaaacccatttattctttttaaaagagaactatgtttgagttaaatagaattattaggaatgataaaatttttcattcaaatatttaatatatatatatatatattcatgattcaaattcaaaatatttgattcaactgaaataatttaattgattcacatgtttgatgattatataattatgaactaaaaactactaattaaattgaaatagtttcatatcatttattctacacaattaataatatagtagaaaaaaaactcaaactcatgactcaaatttaaaattactcgttaagtttgttggaataatgcatgacaattgatttacacactgaatagtatataaacaagatttaaagagttcatatgaaatatttttttgaaaattatttcaataaattatatggtttaatttgatatataacttaagttgctcattatattaagtttgagaataaaatttaatgttgtattctttcataattgaattttattttggtaatccagataatttttttattaattaaatgttaaacacacgcgtgtacacacacataaatgaaacttaaattaaggaaatgaaacctaactctaattagagaaagcactaaacataatttaaaaaaacaaattatatataaattttatcctaagttaatttggccaagttagtattttgaattattggtaacaatgcaaggcacacctgaagaagccaagagtgaggagaacgcaggcttttcttatgcaaatggagaagccggaagccaaggagctgaagaccatcaacaaaagggcgagtccgtacactcgccgtcgccccttaaggtcaccaagccagccaaataccagctggccgacgacggtgcccaatagggcgacggcgaccaaggcggatgcgacctccggtggggtctcgtactggtcttcgccttcacggtggccgtaatatacccttccaattatcttgatgatgagagtgattgagaagaggtcgtaggcatcggtgaagagccccatccctgcaatgatgatggctttgaagtggtagtattgtgtccttgctgtgtctagggcagacaacaccttcaacctagccattgagcttcttcaatattattcccttaaagtctatctatatatatgatatgtgtcaaaatgtttgtggttatgacctatgggagttttgtgccatggtcgtttagtttctgacttttgttaattggtcgcaatatatatgtgtaagcatatattttgcttaagtatgaagtgaggcacctaataatataagggccaaaattaatgttagtgctttagctgggaagtttcgggcttgttggcgtatctgctattttctcgtgggattaatttgttgtatttatacagaaaattgtagggaaaattaattggattttaagtcaatgcctaatgttgtgaagagccaattagattttaagtcaaacccatgactgcatctttatactaaagatatgcgaatcaaatgcatccttgaaacattttacgttcatattatatttgccatctgcagttgccggcgtcatcaaggggtccaggtttgcagtctgatccatttttttaattagtggcaaagcttaaaactataaagcatagacgatcaggggcagaacttgacaattttttttttttttgagaccaacaataaatattataacgtgtaaattaaatataataattttgataatgttattttataggtaattctttttaatggcattttataggtaattttaagcatttaatgatattcttttttgatatttaactatatttttttcatctttaatttattaagagcactttttagttttttgttgtcttgggctctcatgtatatactactgaattaaaaaaataaagatgtaacacctcaaattctttttctgaaatataactttaaaattatttaaataatacatattatgaaatttgcttcattaaatttacttttcatttctaacttgataaaatatctcagtattttttttttcttttgggaaaagaaggaacacatatatacatatattgcattttattaaggaatacacatataattaaaatactcacgaataaatgatattgtcaaaaaacattttctattgaagaaccattccgataaattattgtcattttcttctacctttacacaatgctataataaagtataatttataaagaattaacttgcacaaaataaaatgatgataaattgaaaaaaagtacgtaattatacatacacatactgagtttagtgacccttaagatataaatatagatgtatcgatgtcattacaactgttagaaagaaaataaaatattcatcacccctcaaaatattacacaatatcatcaaaagaattaatagagctaaatatcacgatattgagtatagaaaaatctttccaccccaaatatacataaaaaaggaaacaatcatacattcagagcagtcactacccaagactcataagcgatacgtaatgtgtgcctctatggtgattggtgatatttgaggctcatctaacaacaaaaagtggtgtggatgtaaccaaagtgcgcgtggaggcacacctcttcctctattgtataaatgtagcgatatctactgatccatgtgaacattctccatggatgctccatgacctccccctaaaatggtagttgcaagggtgagtcatccacttctcaaacaccacaaacaacaagcaatagcaaacaaaactaaagcgtataatctacgtaaccaccgcgtgtggttatctaaacaaataacactcttgcatcctaagcgcgtaactattgaacttatttcacaatagagtccaatcattgccaccaatccttccaagtcttgatggtcttacaaaattatgtgaatgacaatcgagagtgatcgctacatacagatgcatcgtacactggtcccttatcttccaactcaaaaagcatagtctcggagtttgttaggagaagcaaagtgagatttgtgagttacccgtgctaaatgagtgcatgaaatgttgggtagtcaccactcgctaagtcccctaggttcttcgaacctctctgaccactatactccaatgtatctctattatcatctacttcctcaacgtaacctcaccttctcataaaaggaaatagaaccactgcttccttaatctctatccaatcctcttgattgttattgctgcattgcgtgcatagtcctcgtgtcacgtgcatcaacaaacacatacaaacaaacaaacaaataagaaagagagacgagactcaggcctacgtattgttctcatggaactagtcatggtcccttaagcggtaaaaccacttgccacacaaaacaatcgaacaacataaggactataattatagatatctacacaaacataataaacaatttgccgagggttgaacatctctggacccaaatctcaacgcgtacaaataaaaatggtaatatgcatacatatatataatataaaataaattctcatgtcacaaatataattgctagagttcacactttgccggtcttatcatccaacaacaacaataataaatatatatgcacacattttagtaattttattaacaaagaatcatcacaatttcagagcatgcattagtcatcagagtttgcagtttatctcaagaatcatataacaattaaatcaacagttttaaaataaataattctaaagtaatttatccagacgcacgaatttcaatgttaaactatctaaagttactctgccactccattttataatgtttcgtggctagcttattttcaatgttctaggtgtttcgaaaatcggattttcataaatcttatatgctaccttacattttcaaacctaacaaacccattttgaggtctaaactttaagaaaaatagttcatactattgtaacacttagcccaaatttgtgacagaattctattctacaaaagatccttaaacttgttttattcatgacttttgctaaaaaaggctaactctatacgttttaacatgcaaaaactcatttttgatataaaaactcaaggaaaacaactcaacctacagatttaagacatggcagcaagcatgaaatttcaagacaacatattcaaattaaagaagtttaacaacaagcatatggttcaataattggagagacccccttacctcttgatgaaactcacgaaatttagaaggaagaatgaaggatgttcaacttttaaaggtttctcttcatgagtaaaaatgataattttaagttactagagaagataaaacaagaaaatgaatacaactcaagtctagaatgaagaatgtaacttatttacctaagcttgatggatcaatgactcaagaacactaggaagaacttggaagaagaagcaaaatgaacctctctccctaaagttagaacttgtgtaaaataggagaatgaggggttccaatttgatttttttttttatgagctaggagataaggtgtaggtttcaatgttgacaagctcattgacacttgaatgatccctagctggccatgtttcaacatgccactccatgcctcaaatgggtatgttttttaaaccaaaatagtaaatctatcttaatcgtctaagttattgtgctaatctccttaagaatatgtgtacccaaagttaaattatagtgtcactacatatggaatttttgttcagacagttttcaaatttctaccaactaattaaataaattatttacactaaaaataaatatgactaacacgaaacttatataattaatatcatacaaagaataaattaaatcacgcaggcatataactaaattatacaatgcatatttttttactgtttagtcctcaacaatggaattttacactgtagaaaaaaatgagaaggaaattttagggtgttacacaagaattatgttttttttttatgcaaaacaaaatttgcacaagaatatgtaaaaaatatcaaaattttctatggatcgatttaatgaatttaagcaaatagtaatatttttaccaaaatcatagaaaattcagcacacaaaaattaaaaaatagaagaaaataaaaaaaagaagtttgcatgaaaaacacaagaaaatttcatatgcaagaaaaatctatagatttaagtttttcttaaagaataaagatattataaaagtcatagaaaaaatgagtttgaaggatgaaaaaaatgtatacaaagtaatattaatgtttaatgtttaaaattaaccataaatattatattgatgttatcaaaagcaaaaaacttagaagtctagtttaaagtgattccaaatgagtgatccaactttaatgcttcttattgcgtgatggattgtgaattgatgagataattgaagcgaacaaccaatttgttcaaaggatgttttggtggcaaagatgcaaagagcaccatgaaagataaagagatgacaaggaatcagaataacatggattgtaacactatttgcaattctggcgtagtgtaactcacacacatgaagctgatgccttatcttggaataacatttaaactttctgaaaataaagaatatttttttttataactttttcggttgccaaaatatcaatagttcattgatagtattaacactcatttgcgtttttacttttcgttaatctattatcataatttaaaatttgttaattatatttacataattattatgatatattattttaagataaaatttcctattatttaattttaaaaaacatattttagttaaaatttattatttttatttctatttaacatgattataaaattaaattatatattcatttttaatataataataaattgtgcaatatttaacactaatttttcataataatggtaaatttttttaatacatgaaaattatatatgcatcttcattacaaaacaaagaaaatatcataaaaaaattatttaatacttattattattattattattatcgcaaaaaacaacatattatagacttattataaaagaagtacactataaatcacatgttaaaatcattacaaatttaaaacaaaactaactacataatatgttaaacatttattaaataaaattaatacaattataatacgcgaatttggtttgatttttttattataagattaaaaaaagacaaaccgcaaaaaatatgtagtttttaatttttttgtgatttttgtttttttttgatggttttcatggatgaaaaatattaaaataactttacttagttttgaacatttctaatcctaaatttagtcatatttaaagttctttgtgatctataagaatgaattctgcaaggatttaagtccatattatttctntgattttttttattataagattaaaaaaaaaaaaaagaaaccgcaaaaaatatgtagtttttaatttttttgtgatttttggttttttttatgggtttcatggatgaaaaataactttacttagttttgaacatttctaatcctaaatttagtcatatttaaagttctttgtgatctataagaatgaattctgcaaggatttaagtccatattatttctcacaaacacaaccatatattgctaactatgggggcttctgaatcacacgaagaactgcaatctgaacagcctcagccacagtcacagcatgtacagcaccaacagccacagccacagctacatgaacccaccagaaaaagggaatcatggttgctgcctcctgatcaaggtaacacaaaagcttccaaggatagcacaaaggcagtagtagataacaatgccactatgatgccagtgaaacatttgaaaggactaccgatcccacacaactatgaacatatactgaaaagtaatacagattcaccagttgataaatctctgttggataagctatatgctggggtgttcttagaccacaaaacaaaggcaagttcaaagtcattcaggatcagtttcaagagtagtttctttaatttcttacctcaccctttctccctagcttgataattgaaagatttctgagagtcattgaaatttgttctttaaattatgattatttatttgagctgtcctcaattttgctgctaccagagtttgaggtaataattcgatttaagagttctgttcatagttttaaattgtgatccacaacagcaattgcggctgcaacgcaaagctttgttgaataccacatctgcatcacaaccatattagttgcatttttttgcaattgctcataacgtaaagatttttgtgactcactgcaaccgcgcgcgttcaaaaccatttttacaaaaacaaagaccgatttaagagtttacttaattactgattgaacaatttttatagtgattatcattatttgtaacacagaaatattgggtagagaagaagtccaacggcaactgtttcatgctgtacgcaagagcactctcaatcacctgggcagaaaatccaaactattggaaatgggtacagcagaaagaaaaaaggtacacacttttcacaaattatgtcaagagtttcactaaaaaaaaggaatatatagatataaaaattaaaaatactaattaagaatatgttaaattatttttttctctctaatttattatttaggtttgatttagttttctatttttttatttaatttgattccctaatttttaaaatctattcaatttagttttatcatctaaattaaattgacggtgttagaaaatttgtattttgtgggatttaaaatcacttgtgataattttaaatcgtcacaaagtacaatttcttaatatctttgacctaatttagacggtatgatcaaattgaatcgattttaaaaatagagaataaattgaacaaaaaaataattaaagaatcaaattgaatctaaaaaataaattaaagaaaaaatactaatttaaccttaaaatatcatctcaaattaaaattgagaaaaaaatatcaccagagtatatctataaattaaaactcacaagcaggtaagttatattgtttgtttttgccgtcataacaatttgttacatatatatgtctagttaactaattccaatatgtctagttaaacttgtttttttatgtatatgcatgttggttgtagtggctcaatgatagagttggctaaactgaaaatggtatgctggctagaagtgaatggaaaatttggcactggaatgcttacaccaggaattctatatcaagtgtcatttattgtaatgttgaaagattccgctcaggggtgggaacttccagtaaatgttggacttgtccttcctggaggaaagaaacaacaacacaaggagaatttgatggagaagtctagggagagctggatagagattctagtaggtgagtttgtggcatctgagaaagatgttggtgagatggagatatctatgtatgaacatgaaggtggcatgtggaagacagggcttgtcatccaaggcattgtcatcaaaccaaagaactaggaaatagaatacaagctatgaaactctctcttctctacgatgtacacataagtatcttattctcattatcatttttctctctctaaatagaatatagagacatggtgtgtgtcaaaataataataataataattaaaaaagaagttaaacatatgttaaaaacaataaaaaatgcaaacatttgattcaacatcaacatcagcagcacctttaatccaagttaattggggttagtgtagataaacccaatgatagatcgaaaataagacaaagaaagagaaagagagaagggaagaaaaaagtaaaaataagataaaagagaggaaaaataagtcaaaataaaagaggggtgaaaggaagagggaaaaaataaagaggaaaataacaaaaactagggaacgactggaacataaaactattaaggggtttaatcctccaccaaacttatagcttttctctactccgtcctaaacgtaccgttcgccaatctatatctcacgtcattaggtcttatttaactacattttctcaagtaagtttcggtcgacctctatttctctttctctttctgtcgaactcttggtaacacactcttgttcttacaggagcatccagtggacgtctcataacatgtccaaaccacctcaatctatgctcccacattatttcacatatcagtaccactgatacctttcgtcgaatatcctcatttcttatcttatccatcttcgtataaccacacatccaccttaatatcctcatttttgctatccctattttatgcttatgttgcctatgtgctggccaacatttcgctcctataacattaccagtcttacagttgttctataaaattttccttttagcttaagggaaattttgcagtcacacaaaaattccgatacactctatcatttcattgattctgctttaattctatgatttacatcctcatcaatctcaccacctttttgctaacatgccctatttttgctagcatgcccctttggctcaggcttatacaactcgtcattaatatccattttcccactacttctttacttatttaccaattttattatttccaccggtgtatatttttgttaatttgtaaattagaatttcactttatatcttcctctatgattgtttttgattcgtttccaattctttttaagtgaaaattgtacatcatgcaaaacatcttcaattgtgttttaaatttgaatttaatttcatatatatatatatatatgtgtgttttaatgatccacaacattggtggtgtcatgtaggatcaatccatgatataattgattattgatataaaatataataatttatttaatacaaaaatgatattttagtaatataacatatattcatagaaaaaataatataaaccaaacatatattttaaatattcctcggaatataaaaaagatttcaaatagttaatcaaacacattttttttaaatgttcaggaatgtcatttctatctaatattcttgggaataatacttttggaaatccaaccggattcggtaaaacaaataaatatcaccttataatgtattctaccaataataaaaaatgatatatcatttaaaataagatcggttaaagttcttttttttttgtcagccaaacaaaaagtgttgtactgatacatatgagtttaattacaaaaaaagacaagcaaataccaaaccagggctaaccatactatgtgttagtgttcctatatgggttgcatatcattaatagcttcggttgccactaatgagagttaactcaccaagaaatcaaacttgtgtatttcccaactacctatcaagtgtccctaccattgattcacctgtaataaaacccttgaaaacaaaacgtagtaaatgcccctgcatagaattatggatggatcgaaactaccccaatcccaattaccgcaaaaattcatgcagccaggtaaaccaatgtgcaatgtgcatgtcaattacctaatgccaagaatgcatgttactggacaagtcgaccattgattgaaagaagaacaggtagcttttccaaggaaccagagccatgaccacgtgcagagggtgaactcttcgttgatttttctagtatccaaatccatgccttaaaaaatcttgttgttccccgtttctggaaaaacataatgggccctattcctatgtaaatcacagtgggtcttacacctcttaccattgtagatctacacctttctttcctgtaacatgacatgagattgtcatgttctttattaactcgaggtgatcctatatcatgagtttagtgctagctaggtaaacaagagttttactattatgttcttcagcttttgatattataagaatgaattccttttttttttttccttccaattctaggaatctagtctgcaatttgtgatggatggcgggattgtttccttgtctatgggcacaagtcataattgatatgtctttctcttgacctgtttcaagtacaatgctgatactatttactggaataatgttgcttgaattcacgatggttcattttcctttacttttcatcaaaataagttactaatttgcgtttgatacctgtttttatgacccaatgcaggagttgaagaaaggggctttatatttggtccacccattgcattagctatttgagcaaaatttgtccccatgaggaaacccaataaattgcctggtatgataattatgatttgagatctttgaatttttgttttgtgtatgttcctctaattctaagttttgtacatcttcaatgtggtcattaaatgttcttaaagtttctatgacaatgaagatgttttgatttatttcaatggtcatgtatcaattatctttacaggggaggttatctcagaagagtattctttggagtatggaacagacaaaatggagatgcatgtaggggctgtacaacctggagaacgagccttaaccatagatgatcttattgccactgggggagcgttaggttctgcaattaagcttctaggtaaagttatcaatattaatgttttatgagctagcaaacaaaatcctttgaaagttaatgtttctgccttcttaaagctatccatgagtgggtcctgactcccatcctaatcacacttattggtttcatatgatgtgcctctctccttaaaagtaagtgctgtagtacagaggctttgttgtaccttatattaggaagaagaacttgtatttttttgtttatgaattaaaaaagtctttagaggttgtgcaaatgaccaaatttggacttagatctatctagccacaattttttttataaaaaaaatttaaatcaacgttatgtacaaggttaacccgcttaaaatataattacttttgtaacaagatgcataaaatagtttgaccaacaagatctttatgcctactattttgagctgtcttattgtttgatattagtgagatactaatactagcatgttggatattttgagcatttattttctgtttttaacctcatattagccttcataatattattttttatatgatagaaactacaatctttatgcctatgcttttctttaattattatgtttttttcaaaataaataatatttattatagctctcagaaccttttatttcctttcaccaacttctggaacgatatgatcataataactttctacaaagctgctttttccaatcataataacacaaatattataaaaaaaaacccactgctgctgtggaagcagaattgcgagcattttatttggtctaaagctcgtgtggaggagaagctttagaaggaggcaaaaaaataaaaataatgcttttttaataaataatttgaaatttggggctgttttgaaaatattttgaattttggggcagtcaaacacgcccaatttgggcgtgtttaaacacgcctaatttaggtatgttcccctcccaaacatgcttaaattgggcgtgtttcccctggttgtgacatatgtcatgcatgcgcggtgtatataaacttcgaatgatcatatcttttgatagaaatgtacgattgaggcatattttatgtcaaaacgctcgaaattgagagaggaagccttcgaagtagatttgatcaactatttttttcaaaaaatgcctctaagtacctcaaaattaggatttaatcttcaatcatccaaaaatttccttgtttttctacttttttaattatttaattaattaatttaatgctattttttattatttaattacttctcttaattttgagcattttgacatatcgtacacctcaatcggacatttctatcaaaagttagaccatttgaaggacatacaccaccaatttatacttgcgttttgacatatcgtacttcaaatggtctaattataaattttcttgagtattttcctttatattaaatcacatggggcttgaactataatttagccaattttgatatgatccgaaaaaagaaaaatactcaagaaaatttataattgaacagatgaaacatcaacttgagttcttttcgagatattatacgcttacaagtagtatagtgagaaattgaacttataagtgttaactttacacatttgcttaaataacatttcattctctcatgatatcccatcgtattggtagagaatccagttagtataatatttcttcatacatttaataaaaaactatattaaaaattagttatataaaaaatccaaaaaatattaaacaaaaccataacaaaattaaaaaaattatattaaataaaataatattaaaaaatatagaaaatatattaaataaaataatatattaaaaattagatataccaaaaatccagaatatattaaataaaatcatataaaatttaaaaaatatactaaataaaacaatattaaaaaaaactaaagaagatcatatctatgatgaagatcggtctaaaaatactttaaaattagataaaaatgacaattaataatattaaatgatattttacgtcaaaaattaaaacacgcccaattttggtctgtatttcagtcgctaatagtttttgcgatagaatattgtggtcgcaaacataaaaaataaaaaatacaatattctatcgtaaaaagtgttagcaaccgaatttgtcacgcccaaattgcgagtgtttgtctgctccaaaattcaaattatttttaaaacagccccaaatttcaaattatttattaaaaaaatataatttttattgttttgcctttagaaggatcagagttctgtttcagaatgaagtttcgattgctcatgatattatctaaaaagcttgccacctatctaaggagtatttgttgggaattggctcgctgaagtcgttggttgatcttgggccaactatcttgatctcttaagacattagatggcttttttctaaaaattttatgtccacacttgcagacatttgccccaacgtgggtttgtcactggcatgcatgatgtactattaacgaattggtatactacaggaacacgacttcaaagaagttatggggctattttgtcgagttccttagagagagttgtctcgcgctcctaggtattctctatcataattcttttgtctgtcgataactgtatgcattacacggtgtatatgaagaagtagaccattatctcttctattacgaagaccactaggtcgcgaagcttatcaaggagatattttttatttattaattggagacaaaagttagctttctgtataacaatttaaaattattttatatcatcggtgtataacttttttttctcatatatattaccgtacatgcatgacataataagataaaatgttaaaatattttatttttttcttacttttttaaatgcagtttttttcttactttattttgtggtattcatgattatgtattatgtatttatgcagtacgaaggtgcagcaaatgagggtggtagaggaccaagtacttgggatatataccttcacccataaatatccaggtatatatatatggctccctcctattgtttttttctccaaaattgatacaattgttcatatgcgaattgacatgcagatatgataaaggacagagacagtggagatgtagccattgattcatatcatcgctacaaggtattaccgattcaaagtttttgtttcttctaaagtaatttatcaattatattatccttactaattaaaagtactgaataataaattaaaattcatcaattatttgcataataaaatataaatttgaaagatgcttttctaattttcttatcacgatcatgacgtacacttttattaatgattgccattagcttgtatcgtgctgtaaaaaaaagctagagtatcatgaaatgtgtaagtatgaccaaatcagagcaaagagtcacccaggggcaccagtggaatggacggattacaagtcaatggcatttactcaatatgtaagtatacaaatgtaactcaatcctcaatgtttagttaaattaacagtaaggatgtaaagtaaacaactactattataggaactatgtcggtgtttgtttactttgtaatcttatcctttacttgtttttaaatcatttgtacaatctggattgtgaataagaccttgaagttgcaaccataattggtgggatatttaggagagcaacgacagacatcaacataaaaaaggtaacgaccaaaaaggctgttgtaaaatatatagccctattagacaatgcttcaattcacttgtaaaatatatatcctattattgtgcagtgtagagactagagaggagtgcaaaattagaagctccaattcaagtcccagtttgttggtaaaatgtagtttacctaaatgattaaatgcttgtttgggaatatagtttacctaagtaatcacttatttttcaatttttttaaaaaaattggaaaaaataagagattatttctttaaaataaattgaatcaatacacactaatttctagatttttatattgttttgtgtagtataaatgaaatggaaccagtaaggacaagtgactaaatagttttttttttataattaatattgaagtttattcttttttttttggtgaattaattgaagtttattctattgcaggataagataaatgaagtgtgtcatgtatgtttattctatgcagtaactcttgtatattttttcattttctcgttcttggatgagccttccttatatattcatcaacatcttattttatatataaaaaataaaagtgagataattgttccatggattttatatattcatcagcatcttattttatatatataatagttattttaatttaaattatctaattttatgaaaggtactagtttttcagagtaaaaatattgatggcattcatcttagctagcatttttaaataagccatgttgtctttaaataagagggattgagagggagtgatatctagtcatttggtgatgttgccttttcttccatttctgattcagtttctattatttccttcaattatctgagaattaaatgcacacataaaatgttcaaatgttcagggcttacttttttttagagttatctaaaatttggttaactagtttagtaattgatgatgttatatttctttttcgtagacacctctacaagcaccacatattgataattgggctgtcgtcaacttttctgcaagtactagttggaatgagcaatggctatacgagtactagcaatactatacaagttcttcattcggttataccctcattttatcatgtttgcttttatttccttattgtattgtactagcaatactataaaagtactttacctaaatttttatataaattaatttctttcgttactaatcctgcaaggaaactcttttatattttaattttaatatattataaacaagagatttgttttcaaatagaaatattgtattttaaaataattaattaataaataacaaatcccactttctaaaatggttgtttaaagaatcatcttagaaaatgaactggcctatttaatagaagacactctaagacgattttttttagaaaaccatcttagaaaatattttttgaaaaaataataaaaaatggatgcttttatgatgatttttgagaaaaaagtcttagaaagtgatttttctaagatggtttgtcccaaaattgtcttagaagcatctttttttttcttcagaaagcaatttctaaggtagttcttgacaaaaccgtcttagagcatctttagtgataaattttgaacaaatatcttgaactcaagatatgatcttcactagatctcctaataaatgaggtaaagaatctccaacatggagaatgagtttttgtagaaaaaccctcaagatttgcacattgttcaaaaaagaataatttttttcctctttctctctctctaagatctcaaaatgagatataccactaaagaaaaattagagagatcttaagacatcttcaatcctatgtgattctatggaaactaccaaaaaatgttctaggatcccaatttgagatctaccactaaagatgctcttaaaaatcggaccttctaagatggtttaagaaatgtcgtaaaaagtccattagaatcgtcgtggaaagcaatttttttaatggtgtttatatattatatctatatttactatattttcccctaatgtgtcatatatgcatctttatcctttatcattaggttttacaaaatatgcattattttagttgtttcgggttattgtgttgtccttggattgcctttaggccatttttaatttatttattattctccaaggtagtctttagggctaagtaggggtggaaacaagccagataaagctaggcttgacctgaattaaaaatataaagcttaacccgatctatttacttgttataggttttttttttaggtttagcctgacatatttaaaattctaacttggcctacaagcctattaaaaaatctattttgtaataaatattatatgtgaagagaatctaatgactatatagtgaaactttgagaatttgtatagtatttttaaaatttaatataaagaaaggtacatacttctcttttaatttgtgcgtgaaaaaaaagttaaaattaattagagcattctaatatgagattaaaattcactaatcacaacaacccaagtaagaattgtaatcaaagcactttaaatattcaacaaaatattgtaaacaaaataaacaggctaagtaaaataccataagtttcatttgataatctagtcttaatgtcaaatactaaaataaataagaaataagagccaaggcaagttaaatacaaagaagaataaattttttaattctcaagccatctctcaaacatgaaacaacgagccaacatatcatcaaatcttcaatgtgatttcttgaaattgttcatccaccttcattttaatgggaaaaaatgtcattaggatataaataaactttacgaaaaactttaaatcaatttaagaaagttaaaaaaatattttttaaacaaaaaatgtttcaacatcttacttatatttccaaataagtcgaaatcattttgtgagatttttaaggtgatttcttcgagcggttgatcatccactttcataatgaaaattagaaaaacaaatatattacttttaagtttaatatatatatatatatatatatatataataaataggctagtctgacaggtctaacatatttttttaaagcttgatcatgacctttttatttaaataggcttttcaaaaagtctgaacctaaccttttcaataaacaagccagatcatgttaggccaaaagccccctgatagactgtctgacccatttccatccctaggactaagtagctactttagtagtcatgcccaatagaatcctttttacccatttttttattaatttaaatcaagaaatgatttagctaaaataatataaagaataaatagagttaaataagtgttatgtttgttatgtaaaatttctctaagatatgaaatttatataattttgatgaacttgtctcaaaagaaaaagagtgcattcaaaggttatcaatatgtaaactaaatttgaaaagttgaatgtgtaatccaaggaatttattttgatagaaattgatgatttagacgactctatttgaggcacgtggagttgaaaagtcctcagaagcaatatcgtttcgaaattcaaaatattagttgaagtaattatggaagaagttatacaaagttatcaaataacattagatctatgtatttaggaacgttgttgtacatgtattgaaatcatagaattcgaccgttaatattagaattttataaataagacctttgatgatcaattttcggtggatttgaatcattatcacttaattcctcaaacaccgacaactcaacacatcaaaattgactattggtttaaaatgtcatcgtatatgtattcatttcaacttttaataaattcatgtttctttatttcactacatctttctgaacctttttatttttttcaatcactatttcttcttgaaacctctattttttcaatctctacttctgttttattattacaattactaacggaatctaatgaatatcaagattaacttttaaatcaaaaacactattgtaaaatttacttagaaactatattataaaccattgtatgattatctatggatgttttttttatcgaaatcactatcaccatatgtattaagcattagacaattatctgataagttaaaaattataaaattgcttgtttgattacaaagaacttacaatcaagaatgaattttatgtctcatctttatatatttatttattaatggaatcatttattaaaaattacttagttataataatacattctttttaaagaataagtataatttttatgattaacaataagataattgagacttaatttgctattaattgagtccaggtcgagacggctagtccatataaaatagctaaatttgggttttaaacattgaatggataattgactcgtaggaatattaatactagtttagtgaggtattgattaaactgatgaggtattgttgaacagcttaaactaatataaacattaaaatggaataacgtatagcatatttatctataagaaacggatgtaatttataatgttatatgatatgatatgagaatataatttgagaatgagggaagtattattttctgtaaaatgaaatctagctaaaaccaatcaatgttattccacttttttattctatttgttccggtactgccattgaagttgactagaatttcaattttttcagattcatttttttatcataatgttttcacactttaagaaatattgagaaaaaagagataaaaattgaatatgataagtatataatggaatatacattacatatttactttctctaatcaacaattattgacaaagtggtagtgacttgagttctttaatcaattagttaaagatcttcgacaaagattagttattatttttgacgggactagttagtaccgatatgatgattaggaaaacaaatacttaatttttcttttattttatttttatatcattttttcttttctttttatttttattctctatcatatctgtcacttaaatataaaaattaaatgtaaaaattaagaattattatggtgtaagtttatcattctccaaaaaataaaccataaaataaaactgtccaagtcatatttagaatcagcactcttatcattgagcatcttatgtcctttggaataaaaaaaagcaaatgcaatagcaacggttcagaacttacagaatcaactctaaaacgttatatatttggaacattagttacctaggaacgtatagtagagccagaaaaaatgggagggtgtccactatccaagccaaaggcagtagataatggttcagcttccagcagcacaaattgtttcatgctgtatgcgagatcactttcaatcacatggggagacactccagaatattggatatgggtacagcagaaagaagaagcaaggacacatctatctccaaatatatattaagttttactaaaacaaaaaaataattatctatataaaaagtagtgttctaaaaagtagatatctcacgaatctaacatacagggatttttgttgtaagattcaatctccacttttattgttaataaatatttcgtctgaaataggaatattgcatcttcctgggtataggtttagataactcttcagttgtttctcctgggtttggttgggtcccttcatattttttgttcattaattcttcttttgtttagtatattttatttttggcgtgttatgaatgatgggtatcatctagagtgctaacctagttaagaatttaggattcctcttaatattgtgatactttaattaacatgcctctttttacttataaaaaggagaaaaaaaaagataacaatttttatatttaaatactgttcattaattagcaactacattttttgtcagtataagaaatgaatgtatattattgatgcatattattagcgtttatctgcaattttcattagaaaaataatatatactatagaatatttacataatctaggaaagaaaaattgcatgcggacagaatccgaatccataattgaacgtagcatcgtaaaattatgttcaagagcatgtgaactgtcaattgacatatcgatgtttattttattttcttctattctgtattcacagtatattaaaacctagtaatcgcaaattctttcaaaataaattggagaaaaattgttcgccaaggtagatctttaaattgataatttacactaaaaatgtttgctattggggcttactgttttatcattggctaattggttaattcagttgatgatcatcaatttttgtggtttaatctaaatgaattttagtttggcctcgtgttaaaaataactgataactaaaataacatttctgatgattaacaagtataataattatatctacggctgatatctaatgactatttctgacggctaacgcaataaaatgagattgacaagcaacccagaatcaggcctactttgggaaagaccaagctggagggaagaattaatcgtggaaggcaattataggaaattttcaaaggctaaatgcatatttttaatatcaagccatgatttcctaaaaaataggagaggtcgatgggtcatggaagttaatagttatttttctgcgcgtagaatgaagtagctagacaaaaggtcaaactaaatgttgtaatcaaaatatttaatgacacatttcaggacaacaatgcataatggaagcatgcacccattgttggtttttattttgaaattacaaaatatctgtaaccaacctgatagtggttaacaataattcaggaaattaaccactactcacatttcctattttttcgcaacattaacgtctcttcttttagcacaccgtaactgaccctttgatggcaaggggtctataaataagtgtgcctacagccttcttgggtccctgaactcattctatatacatcagcatatacaccatctagtgctttaaaattagagtttggaagactcaagagagatcttcagtgcaatccaaagactcaaaattgtgagcaatggcgggaggtatttatgatcttaatttttccgcacttaatctaattgtttatgttgtttatatataagcatgattagattattcagtttttcttaaatttggtatcagagcctgtttattgcctttgccttgcttttgtttgatactcatatatgtgaaatattattttattaaaatatgagtattttatgtgaacattttaattattaagaagctttggaatcatatggaaattgattttctaagctttatgtaaattaaaacatggatttcggtgttgaaaaaggttgaaaaaccattggatttttaatttgggtccgtgggttgcaactgggtcaaagtgacaaaactcaaggttgaagatgatgaacaataataaaataaaaaaaaaacattttgtacttgctatttatgcattttatacatttcatgcattcctatttaatttgaaaatttgtagaattttgatttgttttatgcatgaatatattatggaagagtttattctatgcatatatattaaatcaagtgcataatattatgtttcaattatgcaattgtatatgagaattttattcatcattatattgtatcttgatcttgaagtgcataatatgatttattctcatataattaaattttatgtctaagtgatctttataattttaattaattatagattagtcacaatatctataatttaattaaaattatatattaagttgtttaaagatcatataaggaattaggcataatattataatttattgttaccattcccatttttattttgatttgtgtaacnnnnnnnnnnnnnnnnnnnnnnnnnnnnnnnnnnnnnnnnnnnnnnnnnnnnnnnnnnnnnnnnnnnnnnnnnnnnnnnnnnnnnnnnnnnnnnnnnnnnnnnnnnnnnnnnnnnnnnnnnnnnnnnnnnnnnnnnnnnnnnnnnnnnnnnnnnnnnnnnnnnnnnnnnnnnnnnnnnnnnnnnnnnnnnnnnnnnnnnnnnnnnnnnnnnnnnnnnnnnnnnnnnnnnnnnnnnnnnnnnnnnnnnnnnnnnnnnnnnnnnnnnnnnnnnnnnnnnnnnnnnnnnnnnnnnnnnnnnnnnnnnnnnnnnnnnnnnnnnnnnnnnnnnnnnnnnnnnnnnnnnnnnnnnnnnnnnnnnnnnnnnnnnnnnnnnnnnnnnnnnnnnnnnnnnnnnnnnnnnnnnnnnnnnnnnnnnnnnnnnnnnnnnnnnnnnnnnnnnnnnnnnnnnnnnnnnnnnnnnnnnnnnnnnnnnnnnnnnnnnnnnnnnnnnnnnnnnnnnnnnnnnnnnnnnnnnnnnnnnnnnnnnnnnnnnnnnnnnnnnnggaaaagcataacaatgccaaagtgctcatgaagtctattgatgagcaaattgagacttcaagaaaagcattgactagtactctaatcatgagattttcatcaatgaaattcactgctttaaggggtgtgcgtgagcacattatgcagatgagggacattgcggccaaattgaaaactttggaggtggatatgtctgacacttttcttgtccattttatattgaacattctcccagcaccatatggtcccttcaaaatatcctataacacgcataaggacaaatggtctattaaaaagctcatgaccatgtgtgttcaggaggaaggaaggttgcaattcgaacaaggagagagttctctgttgacaattgagaaaaatgacaagaagataaaatataagaacaagggaactggtaaaataccaccccagactggaattaagaaagaatcatcctgatgttttttctgtaaaaagaaagggcacatgaagaaagaatgttctaagttcaaactatggtttggaaaagaaaggtatgcctacctctttagtttgttatgaatctaatatgattaatcataacacatggtggattgatttgcaatatggtcttttctatattaatttgcaaaatgataccacttatgatgctatgcatgttaatgttggcatgaattgatgtgttatgaatgaggattcctctatgttgtggcacctaacattaggacagatctctatcgagataattaagagattggtaaatgaaggggtacttagtgctttggattttgctgattttaagacttgtgtaaattgcattaagggaaagcaaacaaacaagtctaaaaagggggccaagaggagtactaaattattagagattatacatacagatatctgttgtcctgatatgaacatatatggtcagaaacacttcatctcttttatagatgattattcacgatacatgtatctctacgtgcttactaataaatataaagcattagaagcctttaaggtttttaaattggaggtagagaatcaatacggtaagcaaattaagatcgtgagatcagatagaggtggagaatactatggtagatacactgaagatggacaagcacctgatctatttgtgaagtttcttcaagaacatgggattgttgcccagtacactatgtctggttctctggatcagaaaggtgtggcaaaaagaagaaaccaaaccttaatggatatggtgcaaagtgtgcttagtattttcaagcttcctaagttcttgtggaaaaaggcacttaagatgacaatgtacatattaaaccgagttccaactaaggttgttccaaaaatgccatttgaattatttaaatgttggaaaccgagtttgagacatgtacacgtttggggatgcccgtctgaggttagaatttataacccacaagaaaagaagcttgacccaaggaccattagagggtatttcattggatatgctgcaaggtctaagggatacagattttactgtccatctcatactacaagaattgtggaatcaagaaatgccaaatttcttgaaaatgacttaattagtgggagcgatcaatctgagaaccttgttcctgagaaagatcatacggatgctcaaccatccacttnnnnnnnnnnnnnnnnnnnnnnnnnnnnnnnnnnnnnnnnnnnnnnnnnnnnnnnnnnnnnnnnnnnnnnnnnnnnnnnnnnnnnnnnnnnnnnnnnnnnnnnnnnnnnnnnnnnnnnnnnnnnnnnnnnnnnnnnnnnnnnnnnnnnnnnnnnnnnnnnnnnnnnnnnnnnnnnnnnnnnnnnnnnnnnnnnnnnnnnnnnnnnnnnnnnnnnnnnnnnnnnnnnnnnnnnnnnnnnnnnnnnnnnnnnnnnnnnnnnnnnnnnnnnnnnnnnnnnnnnnnnnnnnnnnnnnnnnnnnnnnnnnnnnnnnnnnnnnnnnnnnnnnnnnnnnnnnnnnnnnnnnnnnnnnnnnnnnnnnnnnnnnnnnnnnnnnnnnnnnnnnnnnnnnnnnnnnnnnnnnnnnnnnnnnnnnnnnnnnnnnnnnnnnnnnnnnnnnnnnnnnnnnnnnnnnnnnnnnnnnnnnnnnnnnnnnnnnnnnnnnnnnnnnnnnnnnnnnnnnnnnnnnnnnnnnnnnnnnnnnnnnnnnnnnnnnnnnnnnnnnnnnnnnnnnnnnnnnnnnnnnnnnnnnnnnnnnnnnnnnnnnnnnnnnnnnnnnnnnnnnnnnnnnnnnnnnnnnnnnnnnnnnnnnnnnnnnnnnnttacaacttacctggaaaaaatgtgaaaggtgatctcagacaattattaactcatgaacaaccacaagaaaagggaaaaccaggatgcgaatggaggtgcaggggtgtgaagcgatgaggaaagggggaataggaggtgttttcggcacaaaagaaacgaagaaaataaagaaaaagttaggttaagttcgtggggggtgagggcatatttgtttgttcacctattttttcaaataataggaggtgcatgaagcaataagagggtgtgcaagaagcaaaagcccaatatctatgtcttattatatatatatattgatatttactgattaaaaataaataaaaattataattcaggtcatgaatgtaaaaaagtgtaacaatttgttttaacttaattataaattagttttaaaattttataatttaatgtcaaattgatccttcaatattataattcaataataaaaacttaattataagatgtaattttgacaccttttatatattgaaagactaaatcagaatttttattctttgtatctattaaataattacatgatcatttatcccaattttatttttacaaggcttggtcttgctcttttttcttttttttttttttccacaaggtctcctcttttgaaagtaattttnnnnnnnnnnnnnnnnnnnnnnnnnnnnnnnnnnnnnnnnnnnnnnnnnnnnnnnnnnnnnnnnnnnnnnnnnnnnnnnnnnnnnnnnnnnnnnnnnnnnnnnnnnnnnnnnnnnnnnnnnnnnnnnnnnnnnnnnnnnngagcaattggtgtgtaagcttaagaaatctatatatgggttgaaacaggcctcccgtcaatggtatttgaagtttcatgatattatttcctcatttggtgttgtggaaaatattatggatcaatgtatataccagaaggttagtgggagcaaaatctgttttcttattctctatgtggatgacattttgtgatctttataatttaattgattaaagtctagctacagcaactttaatcatttaaattatatattaagactctttagatcacataagaaagtgatgagatactttcaagggactaaagattatatgcttatgtatagacggactgacaatttagaagtaattgactactctgattcagactacgctagttgcattgattcaagaaaatcgactttgggatatattttatgctagctagtggagttgtgtcttggagaagtgtcaggcagacctcaattgactgctacttccactataaaggttcagttcgtttattgttttgagactaccttacatggtgtatggataaggagtttcatttctgggcttagagttatggatcccatttctaagtcattgaagatatactatgataatttagatgctgtttatatggctaagaataacaaaagttgtagtcgaagcaagggcatcgacattaagtatctagccatacgagaacgtgctaaagataatacaatgattattgagcacattagcactgaattaatgattgtggatcctttagggcatgccaccatttaaatttaacgatcatgtggaaaagatgggacttggttcccatatgtgattttcattgtaataatgatattaagaaactctattgtgatatttttcattaagtttatgcgcatctacagttatttattctgaaaaacatcaattaagtttggacctagaataaacattgggtttattcattaagttggttgggctaagggatataatgcattgtaatacatggaaggtaatactcattattaagaggacttatcgccatgattcatgcattttatttcttgttatgtaaattaagggacatgttgaccaagtgggagaatgttggtttttattttgaaattacaaaatatctgtaaccaacctgatagtggtcaacaataattcaggaaactaaccactacccacattccctattttttcgcaacattaacatctcttcttttagcacaccgtaactgaccctttgatggcaaggggtctataaataagtgtgcctacagccttcttgggtccctgaactcattctatatacatcagcatatacaccatctagtgctttagaattagagtttggaagactcaagagagatcttcagtgcaatccaaagactcaaaattgtgagcaatggcgggaggtatttatgatcttaatttttccgcacttaatctaattgtttatgttgtttatatataagcatgattagattattcagtttttcttaaattagggcttatatgataagtgggagaatgttggtttttattttgaaattacaaaatatctgtaaccaacctgatagtggtcaacaataattcaggaaactaaccactacccacattccctattttttcgcaacattaacgtctcttcttttagcacaccgtaactgaccctttgatggcaaggggtctataaataagtgtgcctacagccttcttgggtccctgaactcattctatatacatcagcatatacaccatctagtgctttagaattagagtttggaagactcaagagagattttcagtgcaatccaaagactcaaaattgtgagcaatggcgggaggtatttatgattttaatttttccgcacttaatctaattatttatgttgtttatatataagcatgattagattatttagtttttcttaaacccaaaagctaaacattaaaaaatcccatagtaaataattgttgcattttattaatacttcaagatgaatgattgcagtaataattgtaccaatcaaccaactatacttataccgaaataccccgtcaaatcattattgttatttctttagtgcttttaatttttttaagaccctttaattattgatcctttaaataaaatttaaattgaaattaattgagcatcaattacttttaatcattttcttttatttttttcgataactttaattttaattaatattgatattaatatattgatgtatgatttttttagatcagagatttaattgagataattactagaaatatattctttaaaacttttttaactgtttaaaaaatataaaatcagaaaaaaattattaaatannnnnnnnnnnnnnnnnnnnnnnnnnnnnnnnnnnnnnnnnnnnnnnnnnnnnnnnnnnnnnnnnnnnnnnnnnnnnnnnnnnnnnnnnnnnnnnnnnnnnnnnnnnnnnnnnnnnnnnnnnnnnnnnnnnnnnnnnnnnnnnnnnnnnnnnnnnnnnnnnnnnnnnnnnnnnnnnnnnnnnnnnnnnnnnnnnnnnnnnnnnnnnnnnnnnnnnnnnnnnnnnnnnnnnnnnnnnnnnnnnnnnnnnnnnnnnnnnnnnnnnnnnnnnnnnnnnnnnnnnnnnnnnnnnnnnnnnnnnnnnnnnnnnnnnnnnnnnnnnnnnnnnnnnnnnnnnnnnnnnnnnnnnnnnnnnnnnnnnnnnnnnnnnnnnnnnnnnnnnnnnnnnnnnnnnnnnnnnnnnnnnnnnnnnnnnnnnnnnnnnnnnnnnnnnnnnnnnnnnnnnnnnnnnnnnnnnnnnnnnnnnnnnnnnnnnnnnnnnnnnnnnnnnnnnnnnnnnnnnnnnnnnnnnnnnnnnnnnnnnnnnnnnnnnnnnnnnnnnnnnnnnnnnnnnnnnnnnnnnnnnnnnnnnnnnnnnnnnnnnnnnnnnnnnnnnnnnnnnnnnnnnnnnnnnnnnnnnnnnnnnnnnnnnnnnnnnnnnnnnnnnnnnnnnnnnnnnnnnnnnnnnnnnnnnnnnnnnnnnnnnnnnnnnnnnnnnnnnnnnnnnnnnnnnnnnnnnnnnnnnnnnnnnnnnnnnnnnnnnnnnnnnnnnnnnnnnnnnnnnnnnnnnnnnnnnnnnnnnnnnnnnnnnnnnnnnnnnnnnnnnnnnnnnnnnnnnnnnnnnnnnnnnnnnnnnnnnnnnnnnnnnnnnnnnnnnnnnnnnnnnnnnnnnnnnnnnnnnnnnnnnnnnnnnnnnnnnnnnnnnnnnnnnnnnnnnnnnnnnnnnnnnnnnnnnnnnnnnnnnnnnnnnnnnnnnnnnnnnnnnnnnnnnnnnnnnnnnnnnnnnnnnnnnnnnnnnnnnnnnnnnnnnnnnnnnnnnnnnnnnnnnnnnnnnnnnnnnnnnnnnnnnnnnnnnnnnnnnnnnnnnnnnnnnnnnnnnnnnnnnnnnnnnnnnnnnnnnnnnnnnnnnnnnnnnnnnnnnnnnnnnnnnnnnnnnnnnnnnnnnnnnnnnnnnnnnnnnnnnnnnnnnnnnnnnnnnnnnnnnnnnnnnnnnnnnnnnnnnnnnnnnnnnnnnnnnnnnnnnnnnnnnnnnnnnnnnnnnnataattctaataaaatttatttaacaatcttaattttccaaaaaaaatgaaactttaattttaccattttttttataattgaaaatttaaaaaattattatccactttttaagatgataagttattagaaataaaatttaaatattaaaaatattaaatacgcctttttatatcatttgacatttattaattaattttttgaaacactttcaattaaataagctaacttataagttttcaattaactttcagcttttcaattcctaacttgtaacttataagtttttagctaaattatcaactaattttaccaaacatatttttaatattgttattattattttaggatcaaaacgagatcgtttttttgacttgtttcgaaaaatcaagaaaggaaactatgtgatataatctgtttatgtttgtttatattaaaactgaataattggtaaaaatatattaaaattgaataatgtatgacccatatttatcaacaggaaaaggatataatttataaaactatatgatatcatcagagtataatttgagaatgagaaaggagtataactttctccgaaatgagatcttctaaaactaatcttaaaatgaaatctactaaaacttgattcaatcttacgggataaatcaacattttggccacgcattgaatatgtaagccgctgaccttatcgtctttgaaatattaaaaattctaatttaggtgggagaggctaagagattggggaagccggtgaccttatcgtataaagttgtttaatattggaaaaaatctatatgcatctacgtggagactgacttttgtttatcaacagttttgacaaacatgaaaaaaaaaacttaaaatattagtgatctaatagaataagaagagaagtgataattctgtgtttattaatgtaagactatatttacagctacactgtatagtaatcaacttttcaataaaaattgtttccccatattctggggatgatcactactggcagcatcttattcctttggagaacaagtcattacaagcaagatggagattaatatggtgcatcattgaatgggtgctatggaacaacagaaataaaattgtttttaatggtggtcactttgataagcaaaacagtccaggaaattatgttccaatcatggaggtggattaagaacactgataagtctctttttctactcttttgtccagtggagcatgaatccgggtctctgcttgatggggcaatgaattacgataaaggtggcatggtggtccaatcaaggaaaagtgcaggtctgttatgaaataaaaaacctggtattgatggaattcagtctcgtgcaaaaggagtaacatggggtgtcgggtgatgaagttagagaaacatgcaaaggtacttgcttttgtctctatgctgatacttgaaacaacaatgaatggttgattaactaacattcaagaatggttggtgaattttataatggctacaatgtgattggttgggacaaaggcaccatgtgctgttagtggtcacgtgtataggctggagatttttttggtttgcccttagtagattcgatggttttttgggatagtcttatggttgggctgaaagggataagctctgcttgcttcttgctgcaggattttgatgttggcgcttggttaaccaatatctaggcttttgcttcttgcacctcccaaattttcaaaatggccataataaccttgtcttcctcacttgtccataggttgttttcctcacttctccatgcctaaaacattgtcttgttcacttcctcacatttttgtggctcaggttcacttgtacaggtgagttgttaattgtgtttatacattttgtgttagattattataactggattgacttatccaaaattattttttagaaaacgaagttttaggataggtctaaatcaacgaatccagaattaaatccataaaagtaaaataataccggatcagacaatctagatttgttgttatacaaatctagatcaatgaatccagaatggtgtaataatagtactcaatcaaataatctgaaaaatataacatattttcggatttgataatctggatttgttcttatacaagtatggatttattgattcgaaaattatgtgtatttgtttattagtctgaatcaatcaatccagaattgtgcaataataattctggattgtttgatccgttttgaatttttgtgtttcttggatcaactaatctggaacttcaaaacatcaatttcggataatcggatccgaaaattatattatattctaaatcagggaattcaaaattgatgttttgaagttctgggttagtcaatccattttttttcatttcattgccttatctggaaggttggttcagggtatttatattaattataatttggtttgaatatgttggatagtttttgttcattaacttacttttgttgctttgaaaggtttatatggaagacagttatgtgaggaagatgtcagatgaagtggatatgaaggttgacatcgataatgagttaatgacattagaatagatgaagatattcataaagattatggacaagagactgaaaaaattgttgattgtagcaaagcattcataactataaaggcaattaacaaaaaatttaaatattagattgttgttattggtataccaagccatcccacactttacaagccatgtgatcaacatatttagtaagggctgaggtccatcaccaaacacaacaccttcaggtgcaacatgtttggaagcttcgtaaatctcgtactccttatctacaattgcacgtctttcatgcctacgttcatatgtagtaggtctagtgcgatcaccacctcttgtacatgacatatctgtataaaagataacatcaacgtacaataatcagaattcaagtcatcatattttacctaaatattgtgaacatagtccgacacattctaacatttgtaattagagtcaaaatcaacataattaacctatcctaacaattacaatatcctacatatagattaacttatcactacaaatataattttctacaagaaggggaatgaggtgaaagagttttcagtagatagattgcctaaattttgtaactaactataatcaatcaacgaattgctcaaaaataatagacggggtaggtgatgaaagtaaggaggaagaaagccatataattatatgattccatgtgtacgattcatgttttttttttttttgagttcattcatgttttttctaaatccacttcaacgtcgatttttttattacaaaatttaattagaagttactcatctaatcataaagtatcatacatggtaagataaatctttttctataataactagtgtaaaaatagataatttatgcagttggatgtcatttgttttaaaaaaatgtaactacacttaaaaattaaattaaaatagtgcaatgatttataataattgggaataaaaaatgttcatagtagttgagttgctaaatacttttttaaaataacaatttcctcaataccaatttgcattccattttgctaaataaaattacggataggttcatccatagtaatgatgtcaatttggaaatctgttttagattgactgatccataatattacattaaattatggatcgatccattcagagcagatttcgaattgacaatcattactatagattaactaatccgtaattgggcaatgcaatctaggttgcatgattcgtaacattagaaaatattacaggtgatgcaatccgaattacatttttggattccattgtccaattacggatagcttgatctagaaatcaccaaatccaaatctggatcaagctatctggaacaattacggatagcttgatccgaatacaacaaaacataaaatcaaatcaagctatccagataaattacaaaaaataaaaataaaaaggaaagggacgaaagttacaacttacctggaaaaaatgtgaaaggtgatctcagacaattattaactcatgaacaaccacaagaaaagggaaaaccaggatgcgaatggaggtgcaggggtgtgaagcgatgaggaaagggggaataggaggtgttttcggcacaaaagaaacgaagaaaataaagaaaaagttaggttaagttcgtggggggtgagggcatatttgtttgttcacctattttttcaaataataggaggtgcatgaagcaataagagggtgtgcaagaagcaaaagcccaatatctatgtcttattatatatatatattgatatttactgattaaaaataaataaaaattataattcaggtcatgaatgtaaaaaagtgtaacaatttgttttaacttaattataaattagttttaaaattttataatttaatgtcaaattgatccttcaatattataattcaataataaaaacttaattataagatgtaattttgacaccttttatatattgaaagactaaatcagaatttttattctttgtatctattaaataattacatgatcatttatcccaattttatttttacaaggcttggtcttgctcttttttcttttttttttttttccacaaggtctcctcttttgaaagtaattttnnnnnnnnnnnnnnnnnnnnnnnnnnnnnnnnnnnnnnnnnnnnnnnnnnnnnnnnnnnnnnnnnnnnnnnnnnnnnnnnnnnnnnnnntttttttttttttttccacaaggtctcctcttttgaaagtaattttgttcaagagacagcgaatattacatgtaagcccctctcaagagagattccaagttccaacctggtcctttccaccaggcctaactctggttgattagtttattcattttcttacgaccaaaacgacttctccgaagtgtctggacctcaagtcaaccttggttctggactacacatcgtaacatcaccgagtgtctgtcgtcttgttgaaacggcacacaaacaagtgaacaacccactgactctgatctccttcgcaccgtgtcctctctctcaccatttaacaattacagtggtaagaatacatttcgttgacgaaaaaatcttgacaagggaataataattcacagtagactttcgtaattttattttcatcctatgattatctcacttttttcccccctgattcatcaactaatttgacttctgttaggagaaaccaacatttgttgctttgtgcaattgcttattttactgctcccagtctcaagtactgatcgagcatttgagttgagcattttctaatctgcttacaagttccaatctttctcagtctgcaatctgtttgaatctttcttaatcaaaggaaaagttacacactgcacttcatgagcttaaatcaaagttttaaatatcgaccatgatcgagtttgttgatatcttggaaaatcacggacaaatacgatcgatacggttcaaattatggtggtggacagttaaattttttgatgttgtgacccaaatcagaattatttttttaaaaccttggcttaaatatttgtgctctatttctgtttgctttagagatctcaacttctgaacctgcaactctacttgtgacttttttccgtgtaatatttttttttttaactataatattattgttactaagtatttatcgtcagaaggaactaatcttctatataaagatcttattgtttctttaattataacttatgtcttgctaatacttaagagtctttaaaattgaatcaactctaaatgttatgcatttaagacattaattacctaggaagaaaaatgggaggttgtctatcatccaagcctaaggcagtagataatggctcagcttccggcaacaccaactgtttcatgctgtatgcgagagcactctcaatcacatggggagaaactccagaatattggacatgggttcagcagaaagaagcaaggtacacatctatctccaaatattaaggggttttactataaataaaaaataaaaattctatataaaaagtagtgttctaaaaagtagatatctcacaaatctaacatacagggatttttgttgtgagattcaatcccctcttttattgttaaaagatttctttcgcaatatgattgatttgctttcatatagttttagatagctctttagttcaccatgagtttcgtctccctttgtattttttgttcgttcatctttttattaatatatttttggcgtgttgtaaatgatggtattgtctgcagtgttatcctacttagaattatttccaaaaatgttattaatatgaatgttatttcagaaaatatttaaaaattttagttagatttcaacattcctggaaatgtttttgaaatttaaaataattgaaacagagaatgagttacaatggaagttataagtgggttaaaaaaataactcctcacatttctatgggaatataacttactcatcccttcttatgtaataaccaccattaattacttttcccaaaaaaaatgagcatatccaataatataatttttaaaattccaaactattctgttcgtaacaaacagaaatgtccagctaggatgctggtgatttgctgttcgatctaattctccctctctccttctgagaatatttatatggaagaaatattccagagaagaagatcacagtagcttgaaggtggtgtgtgcactgtgtgaaggaaatagagagagtaagaattgtgtgtaccttgtttcctgtaagtgctcatatttataaccactgacctaggaattggttgggagagatttttcttccacgatcttgtccgagactcttggagagttggtactcctacgttccccacttgggacggttatggccacgttctttgtgctggagttgttcaacggagtgggttgattgaatctcattgggcctctcctgatttggcctaacccaaatatccgtaacagaaagcttactatactcttgggaaagagagaatttttctcgcaaaaccgagacaagacagtgtcacctttttcctctgtattcaccttctatttatactatatttaccccttaactgaccgtgggctatttccgagaatcacggatgaaatcgtaactattcgttgccatatctttgaactagtcataatccacgattatctattcagttgaagttgaacgtccactactcgttaatgggccctgcaattaagccgactccttatttctgtaacaaacaaacatgagaatactacaatctcaagtcaatattgctgagaatattttttttagtatgtgaaataaacactatttaaatattgttctttaattagcaactatatattttatttgctagtataagaaattgaagcatattagatacatttttgctagataatcttatttcttaattagcaactatatattttattatctagtataagaaattgaagcatattagatacatttttgctagataatcttatttcttaagcatgcgattatggatttgattcttaattggtgtgcatagtaaaatatctctccgaagatataaactctttaaatgaatttcaatactttaatagtctttattttttgtcaagaaataccctcgttcacatcaaaaaacattagcatacattcacaattttcattaaaaaaataatacatgatcaaatatttcccaatctaagaaaggaaaatttcatgtgaatataatgagaatccattacattaagcacatcatcataaaagtcaatggtggatctacatccgaagtaagtgagaagtgaggataatttcctttcataaatacaattattattatcaatagaggtttaaattgcagttgcaattgcaaccacagttacaatattgttgtaattcttgacattgtaaaaaattgcggacaaatgtggtaaacatgaccgcagttgtgattgtgagcgggttgtagtaagttaaaaaaaaaaacctcttttatgttgttattgtgattgcagaccacaatttaaaaccatgattactatacatgtaaaaataaaacatgagatgaaataaaatgtataattgaacaaaagataaaacactaaatatatgtattttgtttcttctcgaagtcagggagtgcatttgttcccgaccgaaaattttgaaaaaataaaattcaaattataaaaataacaatatatatatatatatatatatatatatatataaaagacattacagaccttggaaagcataaggaatgcctcgaacaggtagcaaaaccaaataataatacaaaacaaagaaactccaacataagtgatttcctgtaaagattaaaaacatgtgaaagataagaacagagtgcctttataacaacttgttatacatataagaataacttcttgtaagtcactttgacacgtctcttatttgcttgatttgtatattgttcatttttctttttaaaaatgttggttcgaaacttgacatgcaactccctagctaataaaatccatcttatgcttttcatccaaattagcaaactcattggttgaaaaatgtaagatatctaaagtcgtcaaatgattaaaatgatacacaacttcagaaagagaatacaaagtaatagaatgaacaatcctattataaacaaactcaatgtatgacaaacatttctctcactatttcaaattcttatgaatgataacacagaataaggtagtaaaaattctattgacaatttcaatttgtccattcgtttaaggatgtccatttcaatttgtctttaaatttatgcacatcttgcacaattgcaggctgtttaattacaacaagctattcatatatatatatatatatatatatatatatatatatatatatatatcttgctatttacctatctagttatctaactatctgtgatgcatgccacgatgacaaagttggttaaactgaaatctatctatgatgcagtggcacaataatagagctggctaaactaaatgcagtttgctggctagaagtgcatgggaaatttgacattagaaagctttcaccaggaattctatatcaagtgtcatttctaataatgttggaagattcatgtgaaggttgggaagttccaataaatgttagacttgtccttcctggaggaaagagacaacaacacaaggtaaatttaaacgagaagttaagggagaattggatggagattctagtaggtgagtttgtggcatctgaaaaagatggtggtgagatggatatctctatgtatgaatatgaaggtggcatgtggaagagtgggctagtcatccaaggtgttgtcatcaaaccaaagaactaagcattaaaatagatgtattaagaagtcgatgcgataaatgataatttgtattactagtaataaagcttttggaatgatgaagtgtgctaatatcattacttaaatagaatatagcagcttgttgtgtaatgtttttacttctttttccttttttaatttgctttatcgattcaataataataaaataaaacctattaagttaaaaaacaaaaaacaaaaaatatgtgggactttcttattttaattgtgttttgaaaagaaaaaaattcagattctttaaattggacagcaaaaatgagaagagtgtcatgatttatgaaaaataaaagatctgtttggatataagttagaagtgtttttgagaatttttttattaaaatgtataattttttttaatagagaaacttttaagaatatttttgtcttatatccaaacagattaaaaaactcaaataaaagagaaggaataaaaataacatataactcaacaactggaggcaggcagatgcgcattatccaggaataacatttttttttacgattttatctaggaataagatcaaagtatatatgagaaaaattaacaaattatggattctatgtttaacactttggcataaggaatacagttccctttatttcagtgcaacaaggcgtcaccttaataacatattttgacaatgaaaagacaaaaataagagaggtcatttgttttatttgaacgacctagagacattacatgacatcatacaactcttatgtgcaaggtcttattttaatttggtttaaaacatctcataatttatttgtttacgaaaatactatgattttttttcctgtatactaatccatcatcaacacaaataaaacataaaatcatctcaccatgcaataaaggaatacaaatactgtgtcttttggcacaacaattaaagatagttaagtttccaagtgtccatcatcacaaggtttataacattatgaacaaactctcaagttggtcacaaactaaaacaaaacaataataataataattaattaagaatctgatcttcatgccaaacatgatttaacaataagggtcatctcccaccatcacctacgataggacccacgtcaattaagagcagcataatccaaagaacctctcatcaccgtatcaaatacgatcattgcaaatcttaccattcaaagagtgcaagggtaaacttaattacttaaacccaattttttctttaaaacgaaatttaactaaaaccaatcttaatgttaatccattttctctttcaaattccgttactgccattgaattactaacatttcattttcagttacaaaattaatgtttttacacccgaaaaaagagaaaggaagaaaaagagaaaaaatgataataatatgataaaaaaattaaaaaagaaagaaatgtataagataaatataaaaaagagttattattatgatatatatctactttctcttccatttcatttctatcccatttttctttttatttttttatcacacatattatcaaataatgtgtaacaatctacatcatccattattgtaaaggactcatatgcctgcactttaccctaaagtacaagttgcactttagaggagggagatccattatgttttgtctatcattctattatatatatatatatatatatatatatatatttgtttcttttattttccacatatacaccaagaaatattgtggcgtaagtttgtcatcattttccaaaaaggcaaaaaatatatttttagtctttgtatttttttaaaaatttgattttagtccctatacttcattatcgaacattttagtatttaaacttttaaaaattaatgattttagtctttaaaaatagacgtcgaaatgatgttaaccagtgtctatcctgaaggactaaaaactttaggagataaaagaactaaaatatttaatcataaaatataaagactaaaaccaagaattttacgaagcatggaaattaaaaacatacttttcatttccaaaaaatagaccatacaataaaaacagttctattcatatatttcgaatgagcactcttatcataaagcatcttatatcctttagaataaaaaaagcgaatgcaataacgatggttcagaacttacagaatcagttctaaacatcatatattttgaacgataactaattagctaggaaggtataatagagggaaaaaaaaatgggggcttcacaatcacaggaagagctacaatcacaactacagccacaacaacagttgcaacaacaccaagacccaaatgaactcatcaccagaagggaatcattgttgttgtctcctgcagctagtaacatcacaaaacaattcagcaatagcacaaaggtagtagataatgtcacagctggcaacagcaccaacaccaactgtttcatgttgtatgcgagagcactctcaatcacctgggcagaaaattcagactattggacatgggtacagcataaggatgcaaggtacacatcgatctataacgaatatattagggggttttaattactaccaaaaagaatctatttaaaaagcagtgttctaattaagtagtgaacatgactgactaatcagaccaaaaaacggtaaacggaattaaaaaaaattattgagggactgagattaataaaaagatattatcgagagactaaaactaaatattataaaagaaaagtgactaagataggtataaaaaaaatattcggacactaaaagcgactttcatgaaaatgataactaataatagtttacaaaacaaatttagacatgaatgttacatcagatttgattaattgatgatgtgacaattcattaacagtgatatatattaaacggctaagtgagaaaaaatgtaagaattaagaaaggttaaatttttgtttagagattaaaaatgaaattcgaaaaagtttatgaaaaaaatatattaaaccaaaaatgttaattacatgaaatactatacgaaaacaaacgttgaaatcatgctgattgaatttacataagaaatttaaaaataaagcttttcacgaaatcaaaggtggcgagagtttgttaaattctaatacataacaacttgttcttgcgtaaaaaaaaaaagcacaactcgttctatgcgtacgtgattaaataaagtattagaatttaagcacatattcatcttgcacaatattccagtcaatctttaattacaacaatctatttatctatgttacagtggcacgatgatagagttacctaaactgaaaatggtttgctggctagaagtgcatgggaattttgacactaaaaagctttcactaggaattctatatcaagtgtcatttattgtaatgttgaaagattcagctcaagggtgggaagttccaataaatgttagacttgtccttcctggaggaaagaaacaacaacacaaggaaaatttaaacgagaaattaagggagagttggatagagattccagtgggagagtttgtggcatctgaaaaagatgttggcaacatagagatatctatgtatgaatatgaaggtggcatgtggaagacagggcttataatccaaggcattgccatcaaaccaaagaatgaaactaatcaatcacaacaccaccaacaagcacatgaactcactagaagggaatcatggttgatgtctcctgcaggtaattcaaaatacttcaagaatagcacaaaggcaatagataatgtcacaagtgccaacaacaacgccaattgtttcatggtgtatgcaagatcactctcaatcacctgggcagaaaatccagactattggaaatgggtacaacataaagaagcaaggtacacaactatcatgaatatattatataaggtgcttcaccatcacaaaaatctactatctctattattcctatttataagacccaatttttttaagttatttgttttttgtataaaacctaatcaatattatctcatgcattaattattttcaaacaaacatacccataattaaataagaaaaagttatattgacatgcatttaaaagagagatataaacattagtgacaatattattattggaaaagtatataaatttaggataaatttattgttataaattaaatttatttattttcttaatcttaataaattaattgattgagtcttataaataaaaacatggataatggatagtatgtaaaaagcagtgttttgagaatcaaacacggttgaccaattggactgaaaaacagttaaccgatcaagtgtcaagtttaaataaacaacatgaacggcctatagaaaaactagtcaatgaaccataaaacagtcttaaaaaaatgaaaaataaacttaaaatatttgttattttattttttattctaaatataattttttattattaataaatattgttatatattgttgaaacttaaacttaagtataatgatatatttaatttaaacttttgtgtctactttaaatgttaagaacttatgaaattgtgtattagtattttagtttgtagtgttatagagttatgatattatgtttctttaatattattttatgtattattcaattaccatcattattttatatatattattctaccacaattcatctgtggttacattgtattaaaatttaaaccaatgtcttaactaattcaatcatccatcagacttattaaatatcaatgctttttgttcctatattccatattgacatatataaaatcctattaaccataaattctatcaaattaaacttgagaaatattgttcatggggaagatcaatatcaagttactagcattgtttgttatataataacttatcttgtgtgtataatggtggtagtgatagttggtgacaataacaatgataataatactattggttgtttttttaatcttgattcaaagattacattgttaaatatttagaggtaaaattttgtcatccttaataatcttatttgacataaaaggatattaactctaatgaaagatacgtgtgatctagatagaaaagaaaattgttatatttcttatatttttatcataattaggtgttctcaaaagagtctctttatgtgtgtctagttaaactaagtcttaaaacttatgcacatattgatctcgcatagttctcatcaatcttaatttaagtaagttatctatctacctttctataatgcagtggcacgatgacagagttagctaaacttaaaatggtttgttggctagaagtgcatgggaaatttgacgctagaaagcttttaccaggaattccatatcaagtgttttttattgtaatgttgaaagattcagctcaaggatgggaagttccaataaattttagacttgtccttcctggaggaaaaaaacaagaacgcaaggagaatttaaacgagaagttaagggagagttggatacatattccagtgggaggagagtttgtggcatctgaaaaagatgttggcaacatagagatctctatgtatgaatatgaaggtggcatgtggaagacagggcttgtcatccaaggcattgtcatcaaaccaaagaactaagaatcaaatagatactaagctatatataaactacctctgccatagtaacatataaataagtattttattcccatctttagtactctgatctctagttatagaatgaatagagacatgttcactctagttgatatctagagatccaagaaagagaagaaagtatataaagatgtgataaaaaaaatgtgagatggagaaaattgatatgcatttttaaagtgttctcatatcattactctaaataaaatacaatagtttgatgtgtaaattttttttcttatttgtcttgtgcattctttttttatttgttggtatttcattttcataactgatacatacgcttcacatatactatcaaacatagaacacggaggaatatggcacggcaacatcaaacgaatatcattatatacaagaatgtcagagcgattgtattcattttcataactgatgcatacgcttcacatatcacacataaatcggaagggatatggcacagcaacatcaaacgaatatcattatatacaagatgtcaaccataatcaacaatacatgtgaagtgagtgtttggtttgccgtttgcacagctccaaactccgttcacatgttccaaagcagcaaagggaaaagttatatacagctggattggaaaaaaggtgggttacgtctaacccaacatttttccaaacacgcagcaaggcttcaacagaaagttattcatgaggcatcaactgaaacagccaaagcattcagttgaacgtgttgtttaccctcgctgtctgggtgaacaatgacagtagcatgagcctcagaataagattgattggctccttcttgtgaaactgatatggagcacactttatctggtgtgccgctttggtcatcttggactttggaaataatttcccattcctctttaagggatgctacttctacacccttttctttatgcctttccatttcaaaagcagtaggtagaatcacataatcattgacagggttgtaaaagggatcgggttctccagccttcagccagtgcttgagaagccggaatacatgaggctcgcgaagaatacgctgatgttcacctggcacaccaacccttgcctccgcattgagaccatcagcctgcatttaggttttaatcaaaatacatttcgggctcttaacccaattattactaccaacctaacgctacttcattgacacaataccaagaagacatcaattgcacaaggattgtgtatagggaaattaacaaacctttgctgattctacaggaactgttccatctccatcaacacatacgtatttggcctgaatattaagaaagataaaagtaagcattggcaaccaaagcaaagaaaagtaaccattggcaaccaaagcaaagaaccaaacgatgacttgaggggggaaataatttacacagatttagcatcaaacatgttcaattaaaactattcttcaattgtatcacactagagagaaaagacactggatgtcaataatagaattaaatattttgaaacaattatatacagtggaagaaaagagaaatggggtgcatctatcaaaaagaattattttttaagtgagataaagtttatgaatagaagaggttgccacattccaaagtcagaacataccacaagggctttaaaaagaaattatttacatttactaactctattaatcaacacagtttattgactaattcaatcaataaatactaaaataatacagacagacaaaatgcagacagaaaactgcccagacttttattcaatgcaagtataaagaaagaaaacttgtgaacttgggaaatcaatattgcaggcagccgtgcaccacagcatatggccatccctctcctttgatacgtaacatgaatccagaaacatatatttaacagaattgcaaatgtattgacctggaaataacgtaactgttgcagatctgtgacaggcttgtccccacttccaaagctgcagaataatagttatgtaaagtgatgatcagttggtcatatgttttcgaaaacaagtccattcttaatacacttcacaaatatcatttctagggtaaccatggtacatccaaagaattgataagaggccttaccaaacactatgaggtgtctcaagactggtcccataaatgttgtaaaatttaacttgcgagggaagtttggcagaagacagaatctcccatgttttgtttgcccatttcaggatctcaaagttgaaaggcaggggcaaatcctcgccattataattaacctggatcacagatagatatcataccaatctaattaacctacataccaataaacatcctagatgagtagatcttgaatagcaatacttgcaatgcttaaatgcattaatgtattctaaagcatggaaatcatcttgaatagcaatacttgcaatgcttaaacacattcaatttcatggaaatgttagtgatacctaaatttaaccaaattccattaatttgcatgctgagaaagttaacactggtaactcactgtgttatttacaagagcttgctccaaaacctcaatgctatcacatggtggatatgactccagaacaatatgtgatttcccatcagaatcatgtctctcacgccacaattccagagcaggaatatgtttccaatgagaattaggacaacccataagttcgtatattgatggacattcaatcagctgtgacattggaacaagcttcaataaataattctacaatatcaaaatatctaaataccaaaaattgaaagagagagagagagagagagagagagagagagagaacaacatgaataaaannnnnnnnnnnnnnnnnnnnnnnnnnnnnnnnnnnnnnnnnnnnnnnnnnnnnnnnnnnnnnnnnnnnnnnnnnnnnnnnnnnnnnnnnnnnnnnnnnnnnnnnnnnnnnnnnnnnnnnnnnnnnnnnnnnnnnnnnnnnnnnnnnnnnnnnnnnnnnnnnnnnnnnnnnnnnnnnnnnnnnnnnnnnnnnnnnnnnnnnnnnnnnnnnnnnnnnttgatggacattcaatcagctgtgacattggaacaagcttcaataaataattctacaatatctaaataccaaaaattgaaaaagagagagagagagagagagagagaacaacatgaataaaaaaaggatgcatgcttacaaaaaaataaaaaaaaaggaacacacaagattatgctttaaaaaatcttttacacagggaagcagcacaaccaatagaaatagagaacacaccatccatgaatacagacagaaaatctaaatcatgtattctatatgaaaagataatacaagatgaaagtgtaatccaataataaaataacttttataaaactatgaataatagcatccaaatatatttttttctcttttgtattatgtcactgaattcttgaatttggttttgagaagatctcatcatcagtagtttcctattccaacggactggttaataaacacttaatctatctgcactaatgtcagttgccttcacagatagtgtgtttggtagaggggggaaggagagaaatagagaagaaatagggtaggtcccacaccttctacactctactttaattaaaatatttctcctccatttccatcatctcaaccaaacacactctgaaaggtaaggataaattgctgagacagttagtaaacaaacacaaaaacacaagtataaagttttgtattaggaaactacaaataaacaaactcaacacagatccagaagacaaaaataactgatctgtaccaactggtgcatgctccatttggaaatataaaagttttgttcccatccttccacaaatgacattccatttaaaaaggtagaattgatggttcccggtgcacctgcagaacaatgtacaagtacaactacaccattatacttttccatggcaaaacaaaaattaagagacctctaagtagctaaaacaatacagatgatacgtgaaggcaacaaaagctataaagttcaaatcatattttggtcaacatcaagtgaaatgacagtgaatgatctaacacttctttttgaaaatcatgcttttatgcaaatttttttccatcaactattttagcctatgaagaaaagatggcaatgccttcttccaatatattgaacatggaaaacaaatttttaacagatccatcattataaatttttaatagacccatcattgaaatgctaaaagaataattcatcaaatatccttaattataattccatacttcttataaatatagaaaagaattacttaccctggaacggcgcacaaattgcaacccaattcttaacatatttctcaaaaatctgaaaaagacaacaaaaatgtacacatgttacagcagcagataaattccaagattgagtgtataaatcataaattgacaaatatatatatgattagattaaatggaaaccacaaaatagatcaaaactgatatgagaagcttatgagatgtgttacatcactttgcaggcacatgaaacatttcaccaaaagaccgcccatagaatgagttataatgtttatttgcttccctcctgcagcattataaattgattctaactttgcagccaaccgatccattgtttcctgcaacctaatttcatttggttaaatacttgttaaagaccttatccttaggattgtgggaaatcatactaccaaccaatagccaaaagatagatacactggagagacatcaatcagattaaattcatttgcacaattacagtttacttctagctatgtttatttatcagctaatagcttcctcagaaaacttatcctttcataataataacaaattatacaaatactcagaaatttttttacaaagaatcaattccattataaaaaaatatatagaatcagtttttcctttgcagaaagatgacataaaataatctcataacatgtacatatttgaagagtagggtgtttgaaattttttaatttcaccattatcgattacttatgaaaagggaaatgactcaattttcaagatttgttaaactggtcaagctttaaattaattcggtacctgttgctttggcgaaaatcatatccaaaaccaaaaagtgtctttccctcttcaaacccccacttatgcatttcaacgatcatgtcatggaaataatacacagaatcacttccaaacatctgctcaaaagaattatataggattcatgaataaattacttggatatctgcattgcacttcaagcaactttaaaaaaagcataccaagtcagggtccaaaatatcaattgcatggagtccatgcctatcttcaggaaccataattcttgaatttggatccatggactcggttttacctgttttcaaaatagattattcggtatgttaagatcgccaaagtcaaagtttcttacagcacactcgtcagcacaaaacacgaattatttcggtaaagaagaaaataaacagcccaggaacagaagcttggacagcacgagcattaaagacacaagaatacaattcggggccatttagaatagcttctccagagctggtttggacttatcatataagcacataagttaaaaattgaaggtatttagttaagctttagaaagtgactcctattcttttacttagccggtgtttgtttgcacatcaaatccttgaatcaagtggcagtttcatgtcaatagcgtaaaactaaaactcagaaactactatttgtagcttttgctcgacgtgcatcaaatactgataaacattaaaccaaacatgcagttaataacttccattgtcggtgaagcttatcaaaagaaataagctttcactgtgataaactcttaattgagctattaatccaaacacgcccttgttctatcacaaggtttgctccctgtcccactgcaattatataataagttgttgcaaagcaaggaaaaaaaaattaacaaacaatttgtatttttatttttagcatataaacctgcaattttacttaattcgatatcaattttatttcatcttcaatccgaaaacatcttcagaaaattgacagcatcaacgaacaacaaaaaccgttaaattagcaatacgtgcaactatatatcatcagtttcagctttttcaacgtgcttttatttatttattttcgtaaaacgaaaaattaggtcctaccggtggaaggatcgtaacgcgaccaaagcttggtcttgagcgtgtactcggcgttgaggaagcgaacccacacacgttctcggctttcgtcggattcgtcaacggcgtgcagcatggagcctccgacaccgggcaccagcaaaacggggtccagattagggttcacatagggctgaggctgcgggttcttgatcagcttcagccacagctccagcgattgaagaatttcgcccagcaagatcgccatcgctcgcgagttagggtttcgatcgggaatcgcgagttagggtttcgatggcttgatgtggggaaagtgctgtgtgctgttgggttaatttcgtcacgatgagtacgccagcaaagttctgcgttgcacggaagagaagagacgataacgtggaatggacaaatttaattatttgccacttgtcagattggctatactttgctcatatgaataatatgaataattccttcacttaatagcaaactagtcttaggacccgtgcgcatacgcacgggacggctccgtttcgctccgctgtgctattgctagatttgtataaaatatttttaatgtttaatgattaaaaattattgtataagcaaacttaaaaataataaattaaaacaataccattcatttgtaaaaaaaaaagtaaaagataaattgctaattgtatcagttaataataaattaaagactctactaagaaatggatagtatttcattgcagtgtttgaggaatgcaatcaataagcattgatgtatgacaccaaattttactatcaagatttaaggtgaatggataaataatagacaacttgatataatgagttaataataacttactctaatatagtaagcataaaaatgcattcttacaagtccagaatgcatattcttacaaaatataattgtcaactggtctaagcatagtaagaatataaactattcaaaatataagatgaagtcataattacaagaacaaaacatggttttcaacatagagtttacatttggtagaattaagacaaaaggtgtatctaacaaatataccagaacacatggttgctgctgggatcaggaaactcaattacaaactccatatgtgctttgaaattgttgtctcttgcaaatgatttccatccagaactgattttaacatatttgcgtgaatggttgaacacaattttgcatgccttggtttcattaaaaacaatatttgtgaatgttgtcttaattaagaaatcatacatgtctctaggtagatgctgcaaaatacatcatggaaagttataatttgatatatgcatataaatcactataatattaaaattacattgtaagttaaaaaagcttaccaaggcattggaattgagatggtgattggccaagaaaatgcgaaagacaatggctttagggtttgatttgtaaagagaatgccattgtggaaatgattttggtagagaattgcttttgaaaacagttataaaaaatagagaattgccatagaaggttaagttgatgtgatgatctccttgaagaccatagtgtcgtctaattgctgtccatccatcaacaattaaagggttggctaagcatcgattgtatttgataaaatgatattttccatggcaatctatcaaatgccataggtcagccaattgatttttaaactctgaaataaagctttttgggagttcagcgtaaggctacattagaaattttacaatattagtggcaatatagtaaatgcagcacaacaatgaaaatctataatgtagaaaacataaaccaatgctaaccttgtccttaatatgcataatattaagcaagtgttcaggttttctatgagactgcatcatcaataaggcaaggtctttaagaattttagtattttcagtcatttttcctatataaaattgtcaacaaagaatatgtaaattatatgggcaaatttgacacaggagcagttaaataacaatgcatgaacttcaagtgtaaataataaacatggtgttaagttgtaataattacaaaaattgtcatgaaacaggatgtgttgcagccagtaatcttttacatagcagtaatcaaatatagctgaaaatggtaagcggaatctgtgaaccttctataactaaaatggttatgcattttgaaagtaaacttcttatttaatagtatcagaacattaatttagaacaattcctaagctggagatcaaaacatttgacatttgttttgccatgcatttcaaaccctaagttttatgataacagaacattcaaatttcatagcttggatgtgataatggatatcataccagtaatagagtgaactttactgatttatttgtagaatgaagccagtctgcagtgattgtaagtagtcaacttgctttcccagccgtgtcgtttgccgtcaatttcaatgagctagggtaatctgagatgaaaacttgaaggatatattaattgggtaattgtgtagtaactggtctcaccaaaagtaaaagttggtgtataagacatatatacgtgctttgggcctgacttatattttactatctttagctttgaaaatcatagagggcccatctcttttccgttacagttgctctgtttggagtatnacgtgctttgggcctgacttatattttactatctttagctttgaaaatcatagagggcccatcccttttccgttacagttgctctgtttggagtattttttttttttttttgtaaaaaacataacatattggtctcgagtgcagcttgtaccaaggtatatatattttgatttgattttatttaactttgtgttacttttatacattggctgcnnnnnnnnnnnnnnnnnnnnnnnnnnnnnnnnnnnnnnnnnnnnnnnnnnnnnnnnnnnnnnnnnnnnnnnnnnnnnnnnnnnnnnnnnnnnnnnnnnnnnnnnnnnnnnnnnnnnnnnnnnnnnnnnnnnnnnnnnnnnnnnnnnnnnnnnnnnnnnnnnnnnnnnnnnnnnnnnatatataattatattaaaatatgatttataccatgttgtttaaaatccaaatgttataagtagcatcatctatgattttcaaagttgaacaattatagcatttacagagtgttaataaggttaagctaaaattgtgtttagtttacagagcaagaaaaactttgaatagttcacgtctagtattagaaagacatacaatttccggattcaaatagtaaaagatagaatcaaaagccatttgcatatataaaagtaattcatacaaataacattgtccattcaacatttgtaatgcttaaacagattataataaacctgataatgtcaattcgaaaggcaacatatttatataaatgtaattttgctaataagcagccaagttacagtgacagcaatggcacaaaagcctgttaatccttgcaatcaacacataaaccagagcactatgttatttgttgggtatgggaactccattataaattcatggttagctttgagatcatgatcctttgcaaatgttttccaacctgatccaattttagcagtttttctccaatgattgtagacaatcttgcactgcatggttccttcaaagttaatgtgggtgaaccttgtgtcttgtaaaaagtaatacattacacttgggagatcctggaatgaacaatatttcttgtcagaaatgcataagttgacatatatttaaagtaactaaaatactgcaatggttgtactttataacttaccaatgcactggatgatatcttttagtcatttagccatacatgaaacacgacagaattaggatttagttggtatagggagtgccatttaggaaaggcaggtggttcagaagcatttttgtatacagtcatgaagaagtatgaatgtccgtaatgtgtcaatgttatttgacaattaccttgcagatcgtaatgctctctaattgctggccagcctatgctaattctaggattttgtaaagacttgttgtatttgactgtatgatgatttccatgagcatcattcagatgccatgtttcctctaagtggtctttccatttcattgcaaagcttttcggaatctctccaaaaggctataggtagtataaaaacaaaaaagtaataagtaatctttaaaaaatgcatgtgtactgcatactaacatgaaagcagaaaatgacatggtaaaaaatcagttatcaaatacaaaatgcatgtgtaatggtacaattaacctgattcataacatgaacagtgttgaaactgtcataaggtgtccttttgatttgcatcattgttgcagccatttcctgataaacttgatcttgattcatttttgctgagttcaacatcgaatataagaaataagaatatgcataattggttttgagagcaatctttatgaatgaacaaacagtagaaaagtctattgactttataagatcatacatgtgaaaatgagacactacacatgacagtcaatgaaatgtaaatgcctatgtggtgtcaagttcagatacgcaattacagcaaatatgaatatgcataatgggtgtcaaaaaatttgactaaaattagcaatgaatgaacataaagtaatctgttgagtaaaaacatgatgcttgtgagcatgatgcagaacacagagaaataatcaagccacatattttaatgtatgtagagcaacctaaaaaacatgcagacaacaaatttaataaggatcatgttaggcgtgtggtcatttttgaaaatcaatcaataaaatcaaatgttgggtacaatatttacatatattcattgtcagtaatatgttggtattcagaatgggttggaaaacaaatatcaggtactctatgtaaatgcctatgtggtgtcaagttcagatatctaattacagcaaatatgaatatgcataattgctgtcaaaacatttgactaaaattagtaatgaatgaacacaagtaattatgtgtaaactgtgttcacaatctcaatggaattgctcttaatgttcatcattgcaagggccatgtccttgaggtttacttgattatgatcaattggtcctaacattattcagatacaattacaaaataaatgtttggagtagtcaacaaagattggaagaaagaaggaaaaaatattaaattgcacaaaaactgtgtttagcaaatttgaattggtatattaacataaaccattaaaacaaaattacaaaacaatggttatatttcattgggtctaacacaagtcatttcaacacgtaggctaaaacatatcattaaacacagtactgtactcataagccataatgtgatgatacaaaggattaaaacagagtaaatttaaacgtgtaaatacttgggtgtaaagaaaagaggagttgttttcattactaacctggaacagttgtttgtgcctgaatctcacgtcgttttgttggttgtgattgtccgtcgttgagttgcagagccttgttgtttgttctgttgtgccgctcagatggtgtatctattgttattattcactaacagctgtgttttgtcttttgttttttgtgaaacgttctcaattgcagtgaaacgttatcacgatgggtggtgagtgaaaggttataaccttgggtggtgagtgaaaggttatgaccttgaatggtgaatgaatagttaaagaaacttatggtcttggtcacagagatagacttgacattattggtttttcgtaaacggctcaaccattaatgcaacaactgtgacttttaagttttattccataaaggccccaacaaatgatttgcacgtgcaatatctatctgaatttcaattgtaaaatatatatatagttgcttctatatacataaagggcccaacaaaagtttacttttaaggttgaaccaatgaaagcaggatgataatatatatatatatatatagttgcttctatatatatagttataacagttataacaatttcttcactttttaatctaatctcatttatatatatatatatagttgcttctaggatgactgtaacgccccaatccgctaatcagggtcattactaaacatcaaccacaatcacagataaaatcagagtttaagcagtttggaagcatactatatgagtaacatcatcaaatgtcctctacatacactgtacatatcgtatggtgaatatacatacatctctgttttatacaaaactatacaaatatcccctcagggtacaacaaaatcaaaaccaaaggctacatacaaaaatagcagagccacaggctcatatcaactagcctaaggtgtgtagtaacagctatctctgcccaggctccttgcctcgggatctgtccgcttctcctgagggatcacctgtaaaaacatagcccacacaaagggtgagatataaaatctcagtaaacttagggcccttgaaggtatttccttcccctggttcactgaccactattatacgtcacatacatatcatcaatcattaacatcattatataacatccatatacatgtatacacgcataacagaaccatcactagacaggcaaacatcagccatatatatatatatatatatatatatatatatatatatatatatatatatatatatatataccaacatcacatatcagtgtgcctcaatacacctccattgttccacaccgaggtatacctgtggtatacatccatgcatcacaatctcctagcacagggcatagttcatattctaaacagaataatcaatgcgtctaaatctccctctcatagggaccagaacatcatcatacatgcatcaaagcataacaagaccatcaggtcactcaatcatccatcatgcacatcaatgcacaacacctgaccacaatcaggttatacacatggctcactgccatttaacacatcaatcagccaccaaggcatatctatggcatatagccattcaccacatcaatcactgtcatgaggaggctacatctaagtatataggcacatctcctctcagggaggctacctccatatacccggcacatctcctgcatgaatccctggcggaggcttcctctagatatataggcacatctctcacacgaggcttcatctatatatcaggtacatctcctttttggtgaggctacctcatgtacataggcacatccctggccaaagggctacctctatgtatcacgggccatctcatcctctatcaccatacacttgcctgggcaggcttcttctgtgtatatgggcacatctccacgtgggaggctacctccatatcacaggctcatctcacaccaggtctttctcaatctctatcatctatcctactacaataggataccattcattcaattctagaattcacatatcatccccttatcaaaagggttcatcatacatagaagtcattccctcatcaaagggttcagtcacatacaacatttaatacttccccatcgagggttcagtttacatttcaagcatatcacgccattataggccatacatcttatccccctcatcaaagggttcagctcacctgtcatgcaagtataatcaatgcatataatcccctcatcaaagggttcaattcaaatattcaaacannnnnnnnnnattacataacattccctcaccaaagggtctcattcacattccatatatcataccctctccaaaagggttcaatatgcattccaagtaaatacaatcaacatacaataatccctcatcaaagggttccattcatgttcacaatcatgtttcatacatatacaattattcacatatcataaccatccctccactaagggtatggcggaacacagtaaaggacacacaatcaaggtccaagagcttacctgctcttcgcaaaacgccggcttccccggtctcgtggctaccaccaccaaaagtgtcaggatcacgtcctacacaagcaaccacataccatcaataacggtcctaagccgttctaaccaaaggaattacaatccttttcaacatcacacatataaccaatcacttcacaagtgattcacggtccctcactaggatccttctcggcccaaccaaggccccagagtctctcctaagactccgctcaggctaacacaagcacatccatgctttagccctaccatgtccaagctcaatgatacaactcaatatcagctcatggacagcatctaaaccattcctagagtattcatcatctactctaaggttcaacataaccatgcactcaacccctttctctatacatgcatgcctcagagccaaaatcaaacttcatcaataaagatttatgaaggctctattatcatcacaataaccccctaaatacaagtctcttcatgactttgggctaattccaaccccatcacaaaagggttactattcatgcaaaaccccaatctcaaaatcaaactgaggagcttgagttttcttacctcaatggcgtcaaagaaaaccctaggaccaccttctcgagctccggtgtccttcccacgcaatgggtctcagccaatcacaagttctcaagctctctctaggggatttccaaaatcactaaaaaggggtttttgatgggaaagggatgagtgattcaagcttcccaagtgtttccctcacaatcaaaggccataagcaagcgttttgatcaagatttttggccctaggaagctcaagggagtcagcaatggaggtttaggctgaatgaggaagaagaacctctctctctcctctttttcgcgttctgaacgagttatataaaaactgattcacgagtctcgcgcggttcgcgccgctctccgcgctaaacgcgccacgactcaaatctcgcgctactcgcgccattacccgcgccactcgcgccacaggctcgggccttccacgcgacaggcgtggacattcacgctactcgcgtggagatccagaggagaacatggttttctatggcacttcccacgcgacccgcgtggatatccacgctacccgcgtgacatggcagaaccaaattgtgaaatgttaaatctgtcttttgccatcctaaaagatttagcaaacacattgtgttcatccagcatttcttttaactttgacacaaggtctggatcaacaatgtgctcccatctaagcatgataacatattgttaatccatataaatctttacaaaatataaaatttgcagaacataataagcctaaatttaccttgctgtgccaattctgtttttgatttcattttcagtgtcatagatatagagttgagcaaactttggttgttttccaggcattggtaataaacttccaatcaagtgacaagattgtccatgaattttataaatgggtggaccttttcctttcaatacacttttatctatattggcaccaacagagctaaaagcaaacatcatattataagccctgatattttgttggtaatttttgctttgtggtgcatcctcatcacatagtagatgttttaaaagtaatggtggatctttaagcaaaggaagttgaatcctcccaatgctgcaacaaagactatatttaccattactcttgtttctgttctttttgttactttcttgataccacatataagctttgcaatattcacatgtactaatagggtctcctatgtcaagatattctaaaaaaacaaaaatacattagtctgacataatgcataatagtccttatgttgttatttgcatttttgtaaggacttttattttcggcgcttaaccccgcgcgatagcgcggggattcaggtcagaaaaccctgctaagggtgcggcgtcggaggtgccaggcttggcgctggaggcgccaaaccactggaaggtggcgcctagggcgccagacccacgcttggggcgccacgggttctggaactcggcgcccagggcgccaggacggcgctggaagcgccatgacctctggaggtccacgcctggggcaccaagattggctccaggagcacaaagtttcccagccggcgctggaggcgccagatgcggcgctcggggcgccagacttcctggaagttggcgcttgaggcgccagaagtggcgctcgaggcgccacagcccctgtaaaccggcgcctggggcgcgggtgtggcgctcagggcgccagcctcaccgccttagtggcgcctgaggcgccggagctggcgccggaggcgccagaggtcgggcagagcgagtataaatagcgaaaaacgcgaaaagagaggaaaaatcagcctttcttcttcctcccttagcccaacctccattgatgacctcccaagcttttagggacattatctactagccnnnnnnnnnnnnnnnnnnnnnnnnnnnnnnnnnnnnnnnnnnnnnnnnnnnnnnnnnnnnnnnnnnnnnnnnnnnnnnnnnnnnnnnnnnnnnnnnnnnnnnnnnnnnnnnnnnnnnnnnnnnnnnnnnnnnnnnnnnnnnnnnnnnnnnnnnnnnnnnnnnnnnnnnnnnnnnnnnnnnnnnnnnnnnnnnnnnnnnnnnnnnnnnnnnnnnnnnnnnnnnnnnnnnnnnnnnnnnnnnnnnnnnnnnnnnnnnnnnnnnnnnnnnnnnnnnnnnnnnnnnnnnnnnnnnnnnnnnnnnnnnnnnnnnnnnnnnnnnnnnnnnnnnnnnnnnnnnnnnnnnnnnnnnnnnnnnnnnnnnnnnnnnnnnnnnnnnnnnnnnnnnnnnnnnnnnnnnnnnnnnnnnnnnnnnnnnnnnnnnnnnnnnnnnnnnnnnnnnnnnnnnnnnnnnnnnnnnnnnnnnnnnnnnnnnnnnnnnnnnnnnnnnnnnnnnnnnnnnnnnnnnnnnnnnnnnnnnnnnnnnnnnnnnnnnnnnnnnnnnnnnnnnnnnnnnnnnnnnnnnnnnnnnnnnnnnnnnnnnnnnnnnnnnnnnnnnnnnnnnnnnnnnnnnnnnnnnnnnnnnnnnnnnnnnnnnnnnnnnnnnnnnnnnnnnnnnnnnnnnnnnnnnnnnnnnnnnnnnnnnnnnnnnnnnnnnnnnnattcctcccaggagatggcaattcctcctgcttgagacatagatagagagatggctattcctcctatcatgtggtattattctaggagatggcaattcctcctactgtatatatgattttcagagagcctgatgtgctcggccggcgggccagttgtttgtgtggcttgtgtatgtatatatgatagtgggccagggtggaggagatccctccttggatcctgagcttactgagatatgttatctcaccccgtgtggggtttatgttgatttcaggtgatccttctggaagagaagagccgtctcagggcaagaggcccatcagagactagtctgcttagtggaggagcagcatagagggcttgtaggctctatttatgagttatttgatgtatagttttgtatacccctctaggagggctgatattcttttgtagcaccgcctgtggtgtgaaacggatatatgtacagaactttgatgtattatgatattctccctgaggataggtatatacagttgtgtttatactctgccttcgtttctgctatttgttatattgttgggtgtgatgagaaactggatcagcaggggcgtgatttatgattccgtttatatgtttatgtgtatccatacataatgtatcaagaaaacgatcctatgcttccactaaactattttattgatgttttatgcgctaatctgatattattaatgataacacttcggaggcctacggggtgttacaattttaaatagacttacaaacctgtgctaatctgttgatcacaattatgcctttggtctgatataccatcatcaacatcatggcaattatgagtatcttctgcataattgataaactttctatactttagtaatgcaccatatgttatcaaacattttagactctcagataaaaaatttaatacctccagttttagaatcaaatattgaactataccatttatctgctacaaacctgtggtaatctcatcatcataattatggctttgatctgatagattgccatcatcatcattgcaactatgattgtgttctgcataataaattgtggtaatcacaatttctttatattatatatcaaggtttgataatccatttgcttcataataattaaaacagtaccattcatttgttgtcttgtctcatgtgcctgctcatgtactatgcaatcaatatgcctatcactatgtttctcagcagtggaagttgaagatgcaacatcaaattgattgagcaaattagctttaaccgaactgttatttttcaaagatttaaatcgtttgtttggaaggtccattgcttgtggctgagtattactaatatcggctaatggaatttgtctagctaccttacaggccattctttcttctgaatcagctaacatgtaaaaaaaattgatatcattagtgtttgactaataacaactatgtacataataaaatgattcaatagaagttctgcctttcagtgtagaggtgttaaacctcttgtttctttcacttttttaatcctgttaccactactatggttatatgttgctaatttttttccttgaagtataagctttctgattaatctagcatttcgagcatttcccaaatctgagagcggatctgaaaaagtcaggtaataattgattaaattcataataataatagtcacagttcagaagattgtttgttatatgatcaataacttaaatgataattacatttgaataaatgagtacctctgttttcagaagtttcacgtggtaaacgcttttgttgtaaaatatattttcgttttgctcttgcagcttttgtaacaatctttcttttgaaatcctcttgttccatgtttcactttgtgccaatgttcaaatagtaaggttgacctcaactgtcattttgtcgttacacagactccttcaaaggtttggctctgacaagcaaatcgaacatgtattaaatatcttgtaacaacatttatatttttttaaataattgacagtcctccacagatatattggttgtgaccacagcaaatgcttttaaacaacgtacactattttccatcttgttgaatataacagttatgagaagcatcaatagtaagtataacattgaaaaaccaagtatctagctttacttttgatttgggtaagactcaccaaacattgttggaaagattcaatacaatgcttattaatgcttgtccgttgagattgacaaagtttaatagtgaagactattgtgaatgccattgaaaacactatttattgatgagcacaaataacaacaacaatattcaatatttcagtatgtacctttacattccatttcgccgggtagcattctcaatcttgcaaaaattcaattcaccagcttagtactaatgcttctgagcggtttttgcctctaaagtgcattgttttatttggattttctatttcattcttataccttgtaacagttagttataatgtaactttagtatttgcaaaagctactggtagtttattgggcttccactctcacatttattgagacaagacattatgaatcatagcctttacttatcagatggcattagatgcaggaaccattgaaagattacctttttttattggttttattagtcacaccaaattaatgattcaccacagtcatatcatagatgtacctagcttaaacccacattgtacttccgtttcttatttttattgttttggcgggccattaatatatttagtgcgccaaatttctcatccgtggcatggactacatatttttacagtttaacttctactttatacttattatcatttttattagtttgaccacacacattataagatatatgataaactccttgataattgtttgtattttctctaaatgagttgctaaaatttacctaatcaagtccattttctctaaatgagttgctaaaatttacctaatcaagtccaatactggtccagcatgatatgacaacctggacttaggaccaatcttattattaaattctgaaattcagtttcctcaatgtgctatccagaataataaagtatggtttgttatcaacgtaggtaaatttataatttatgtagaaaacctacacataaagtttcacaattgatgtttctcactttgcttgcaagcaaactggcacaaagcagtaaatgataactgtatgaagacaacagtaaatgtaagttacaaaatggcaaacatacaaaaacaatttatattgcttaacactgttaaaatacttttccaacttagattgcttaacattgggcaaaataatgttaaaataactaccatgtttaaaagacaagagtattgtctgaatcacattgtactacaacacaactgtatcagaattgctgaaatacaaccatactatttaatacactggttcaaaaaaacaaaaaaaaaatccaacaaaggtcttcaataaggcttaatctcttctactcctttttgatatgctttttcaaccttgtacatgatagttggatttgtgataaatcttcaaattgcatgtcttccagcagagtatcagtattgctagaaatccgcttagatggtgttatggaagatagtaaattaggatcagattcagcagtgactgaaaagcattgctgcatgacaaacattatttcaattgaattagtcacaagacaaaattgatctatgtaataacaatgaaacataataaaaacaccaaataacttacactatcaagaacatcattactttgcgatgctaatgatattgatggctcaggatcatgcttaataataaaataagatgtaattagtaactactcatttcagtgtattccaatttctaaacacacacactctcgatgccagtgtaaaaaaaaacatcaaatcacttacacaatcaagtatatatgtgtgtgtgtgtgtgtatttaccggaagggcacaggctgacagtttggcaagaatagactttattaatccatcatcttcagataactgagagatagaatgacgtgtatttccaggaataaatttgaatcggaaagcacatgtttttcctagtagacgatcaagagcttctggcatatctcttggatcaaattctccttcctatggaaagacaattaggaagcttttttttcaatcaactacaatataataagattattataaagaaaataacatatcatgatacacatagtcgacttaacctcagcaatcattttctgtttgatatcagcggcagtttcttcaatcaaggcaacacactctcgatcccacaatgtaaaaattgcaaattcacctgactgagatacgctgacgtctacacgaaacctgtgacaaaacaaaaatgaatctgtcatatttcaatatatcacattttatgcacatatagcaaattattgactaaccttgggtttgtgtttcgactttcattaccacatgcaacacaaataaaaggcaaagccactggatcaacctttttgttgcacttcggacatgactcataaatccaaccattggctaccaataacttagatatggtagcaacaattacacaaacatcatcctacatcaaaacaaacaaatcagtttatacaaactaaggttcacacactttatgaatttgaactcaaacctttttcaattgggttagttgatccatagattttacaaaagcgttatgaagaaatcgatcagccacagaatacagtgaagaaccagttaattggcttcctatttgggaacatgtattggtagttagctggcttggatccattctgcaataaaaactttaatcagagcaatattattaatatataataataatacacaacatcagaatgttacagagattaaaaatgcaacctatccttgaattccaagatatccttattatcgctgttcacaaatattttggatccatacattgaattttgtattcctataggataattgcctgtataaaagaacaaaagtaacacattaatgcttgacaacaatgaaggcatacattgaccgtctattttttataaagtaacatacctctagcttcctttattttagccatagtcaaaattaatatcaatgggccagcaactgctttttcaaaatactccttaaattccatagcaagtgactcgcatagagtacaattgattacactaccactgtgtcataattgaagaagataataagataaactatagtacaacaaacaacgtataacatgtataacatattcctgatattataagaccaatttgtgcaatgaataccactgatctctcattgtgaagaccactttctttggttttccatcaaaattccactgactaatttgaactacctcatcaataacatcttcaagcaaaaatcaaaattagatagatcaccaaaatacattatatgttatatgtaaaaaatgaagatactatgttatatgtaaaaaatgaatatactatgatttttacaacaaaacttacctattaagtaatcaggactggcagagccattttgaatggcatcaaacattgtgaaactgtacattgtgtttggaatctcaggcatatcatgaggcgtaactttcgttgctttgacaaagttaattttaaaacatgttgcgtagccttgtactgacctatatttttttctacctcaaagttttgaatcacatatgtttcaccaatttgaaaatttacattaagcactttatcatcaacgttcttcatttgagctacaatttgatcaccctggagaaccaacagtttagtacaacaatatcataaataattttacaatcaactaaatacaaacaatcgacacaagatatccttacatccttgtcaattagtttaagttcaatcgtagacttaggtgatcttggtatagtccacatacttataagtcgaatagcaatcttccaagtttccttggaatcattaatctctgcgaaatagtgctaacaaaatacacaaataacagttttgtgatttgacagacatggataaaaatatttgttatttaatatattaaaaacctaccagcagccattaataaccaagttcaaaatggagatattctgtagattaaaagtcttgtatttggagatattcttacccacagctgaaaaataacatttatatcaaaaggttacaaataagttctctaacataccagagttataccagacacaaaaaatggaagcacatgtcactaccagagttataacagtaaaataaaaacgggtctcacaataaatgtaaccacaatagttataccaaaaaagaaaaaccaggtctcacaactaaaatattataacttcaaataaccaaatttcagagcatgataacaaatatactttaacaaaggagtacaccaatataaatggaaaaacaaccaacctgttcaagtaaaaatatgcaagtaaatatgacaacagtagttataacaaaaaagaaacaggtatggtagaatagaagtgacgtaggagaggcaaaaaagaaaatttccatattttcgttctcattctccgaataaaaacgtgtgaaaactaaaaaaaaatcacaaaccctgcatttacccaaaccaagtcgacacattcagctaacaaaatcaagcaaagtgttttcgatgatgattcagaggtaacctagcggaggcaaaaacgaaagcaaatatgagcacaggagttaccacaaccaaacccaaagagtaaagtagcagatgcaagagacgtcagaaaaatggtgctcccaaaagtaataacataacacaggcaagaacatttgtagaaaatggagtggagtaataatagttgaagaagatatcagcttgctctctagctcggcgaaatgacaacataggagttgtagcctgaacaatctgtccatcatccacagcttttaaatttgaatttgaaatttcaaactacttcagtacggcttattgaagaactgagaatgaaggagagaaagaaatagaagaatagaagaaaagaagaagaaaagagaagctccagacagctgtgatccaatttcttttagctgagaaaaaatgagaatgaaccacagttagccacgttggattttggtgctaaaatgagttgtgagagtgacacgtaacctaagcaaaccttcttttattataagtaaagagattttataatctttagagtcgatggaacatttaaaatagaaaaagtaatttaaatagaaatttaaaatttttaaaataaaattcagtgttgtttggatattttatctgaaaaatttaaaattcaagaaattttaaacataaatttcagctaactacaatattaattttggaaagtttatcatttaatattctttttgtgaaattttttatcacttaattttttaaatttttgcatattgtaatatcactgacatgttattaaaaatgttaaaaaaaagtaaaatgatgttgttttattttaatataatatgacaaaatgcacaaaaataaaaaattaaataataaaatttacaaattgatgaaagttaatagtaaaattcgtaaaaagaaaaattggatggtaaaattaacaaactattaaaaattaaatgataaaatgcactaaaaataaaaattaaatgataaaattcataaaattatgaaacttaagtaataaagttataattaaataaaaatgaaaaaatatgaaattgtggatatannnnnnnnnnnnnnnnnnnnnnnnnnnnnnnnnnnnnnnnnnnnnnnnnnnnnnnnnnnnnnnnnnnnnnnnnnnnnnnnnnnnnnnnnnnnnnnnnnnnnnnnnnnnnnnnnnnnnnnnnnnnnnnnnnnnnnnnnnnnnnnnnnnnnnnnnnnnnnnnnnnnnnnnnnnnnnnnnnnnnnnnnnnnnnnnnnnnnnnnnnnnnnnnnnnnnnnnnnnnnnnnnnnnnnnnnnnnnnnnnnnnnnnnnnnnnnnnnnnnnnnnnnnnnnnnnnnnnnnnnnnnnnnnnnnnnnnnnnnnnnnnnnnnnnnnnnnnnnnnnnnnnnnnnnnnnnnnnnnnnnnnnnnnnnnnnnnnnnnnnnnnnnnnnnnnnnnnnnnnnnnnnnnnnnnnnnnnnnnnnnnnnnnnnnnnnnnnnnnnnnnnnnnnnnnnnnnnnnnnnnnnnnnnnnnnnnnnnnnnnnnnnnnnnnnnnnnnnnnnnnnnnnnnnnnnnnnnnnnnnnnnnnnnnnnnnnnnnnnnnnnnnnnnnntcaaatataatgtttatatataaaaagaaaatctaaaagctggttagaaaatggatttattattaaatgttaaatcttaggatttgcactaattttctaaactagttttgtgactcaatatcaaaaataaaagataattattgaaaataaaatttcagttaaactaatgataatttgaaaacaatttcattaaataagataaaattagttaaaatttatttatatttttttacacaaacattcaaaacatttttttttacatataagaccacatgaaaaacatatcaaaaatataatatatttttattatgtatcttaacgagattttgtcaaaatacacaacaaaataatttttattgtgtatcttgcttaattaataacaagtgtcaaaaccaacttcaataatgatgaaaataaggacaaatcaaatatttatgtaaacatagaattattataaactaaaactagcttagttgaaaattagaattttatcttgtaattgtgacggctagtttttaatcactaacatttgcagcaacatcaaaagattgaatagagtatgcacaaccttcatgaagttctctttggaacttatgaataagtttcctctttacgtaagcataaattcgatctccctacatcaaaatgtaaatcgtataagtcattaaaaaccaaacaacgttcaatactattttaaaaaatagccaacaaaaattatgaaaaccttcatctcccccaaatatcttaacataaaaataaaatccccccattaacatccggtcttaagtcttaatcacgaataaaatccgatagtgtagtttatgcttgggcagtgcaatctagttagggatattcacggatatgggttacttgagaatctctcgaatcaatctgaactgattcgaacagtttgggttggataatttatgtatttgggtcaaaaccaaactgaattgggtcatgggtttagatttatagattcgttgactcgatctgtgaactcgtaataaaaatataaattttattatttatatatttatatatattaaaatttaaaaactaaaaaaatattttgacaataaaaaaaggtgtggtactataaatgtttggaccgaatgaagggtcagtccataatcatctcatctcatcttttatgtgaaggtgtggtactgtaaatgtcacgggtttaggtttctttttcttttgcacttctgtgttctctctcatctcatctccttctctgtggttctacactagctccttctctattctctctcatctcatctcatcagatcgatcaagcatcaggttttcccctgcactttttttttaactctttaacttctcgtgattattctggtttgtattcattgggattttgatggaaacagggatgggaagaaaataaataaccttcattgttgagtgttgactcgaatttttgttgttgtatttgatttactgttttctttttcttgtttgctttagaattgagctaatctttggtaaaattttaagagggaaaaatgtgtctatttggattaaagattgagagaattagtttcagagcgaggaatagttagggcttgttttttttctctcgttggttgatttattctttgagagtttgatttaaatgatgtcttttatttttcttttgttcttttgacattctttgaaagtttgattacattaaggttacttaaaaatcaatgttcaacgaggccaaaataatgatattactttttttgttaatgattgaaataatgtcattttatcataaaaacaaaaacattatatttgtataaaatatcaattaatttttgggctaacggggttgtgtttaaatttttagagttgtttggtttgactttaaatactactaatattggatctccaagtattgaattgcaagtgctgaaatttcttaatgtattactttcaggtatactgttatttatttcacctttttttcatattttgtttactatgtttataatattaatgaatcatattttgttcatttgtttgtttcaacaaatctggttgcaataaatttggttatagcaaaacttattgcaagaaattaatttgtgaaaaatagttgtgattcagactattatagtaaatcttgttcaaaaatcttttgttttaatttatattataagtctattttagaacattatgttcatggtattaaatgaatcaattttactactttcatacatttgataatattgtgttaattgtattgaatatttgaaagaatcgtgatataaaatagtacttctaagaaaaaatttaaatgggtaacccgttggcctaaaccgaaccgatccattcatgaacgggttgggttgggttttaaaaaaattctgaaaaccgaatcgaaccgaatcaatcaaatttgattgtgttggattctaaatttgacgaaaaccaatccaaaccgatctgcgaaaacccctaaatgtagcaagacttttaagaaaagagcgttgatacacacaaacacctctacaaataagtcatccaacactcagtggcatgacataataaatattattttaatatttaataaaataaagaattaaaagaaaagaaaagaaaaatatttttaaatgggtgttggatgggtgtgttgttttgagtgggtgtttgttaaacatcatttcaagaaaatccttttgtcatttgtaatggatttgggatgctttatacagtgttaacccaaactgtacaacccggtcgtattatgttctttttaatattttaaaatattaaatagttgtaatgtttttattatttaaattaattttgttaaaaataataatcagaatgtaatgatttgaatcctaatctcatttttccttctccttttctcaatcaatgcaccaatcaataaatacattaacattgcttcatgtattgtattgaattaaaaatttgcaatagtgttttaattcggttggtttattcctttaaaagcaaatttttagtaaggaattaaaatggtattctgctaaggaattaacacctcgaaaagcttatttttgttgtgacctaactttgtcgacccgggtaaatataatatagatatagaatttttttctaaattatattattgatatcaaatatttattgacttattgataattaatcttttgttaaaaaaattgataataatagaattttttatcaaaccacgtttttttttctatgcagatattttgaattctcatactatataaaatagaagtatacgtgtcacgtgttagtgagtggcttggagttaagcagccactcttggactcgtacgttgtagacatatcctgtttcagttgcgctttaagatttccttattatataggaacaaaggaaatgaaacttgcttccttgatttctggttgcactaactacactcacctcctctctattaaggtaaaactcttatccctctctcgtccttcgtgattttgaattatgaacatgtttggatgtaagtttctttagaagtacttttaaaagaagaaagtaaaaaagaaaaaaacataaaatgagcttctctataagttaaaataagtttttcattagctcatttattaaatctacgaaagtgtatttaatgtaaaacttggcttactttcattaacgttgctggcatgaatatatacataaaataggcaaccaattggttacaacttattagctaaactatctaactaacttcatatcgtaacaactatttaaaacttacataaaaaataactaacaactaacagtaagcctagataacaaacaataagataacaatactcatatatcttcttttacactccccctcagttggagtatgtagatgacaaatacccaacttggacaacaaataagtaaatgctcattttccaagagcttttgtgaagatatcagctggttgttcagctgatttaatatgagtagtggcaatattcttttgaagaacatgatcacgcacgaaatgacaatccacctcgatatgttttgtgtgctcgtggaatactggatttgttgcaatgtgtaaagcagcttagctgtcgcaaaacaattgcatcggagaggaatgagaggcacccaaagacttgagaaatgcttttaaccaaatcaattctgaaattgtagaggccatagcacggtatttagcttcagctgatgatcgtgatacggttggctgtttcttagttttccatgaaattggaaaagatccaagttgaataaagtaactagtaaccaatcttctagtaatgggacaacttgcccaatctgagtcataatatccatgtagttggagatctgaagaggaggacaaaagtagtccttgactagggttggccttgacataatggagcaaacgaaggacaacattgtaatgttccaatttgtttgctgcataaattgagaaaaaacatgtacgacataacataattttggtcgtgtgattgtcaagtagatgagtttccctataaatcgacgataccttggtggatcgttgtagtcaagcccagcagcagtggctaacttatgattcggttcaatcgggaagtcaacagcttgcatgctagtaaacccgcctccttaaagatgtcagtggcatatttacattgtgacatgaataacccagtattgttacgagcaaattcaataccaagaaaatactttaaagagccaagatccttgatttgaaagcatgaattaaggtaggacttgagttcaacacaagttgtattattgttgcctgctagtagaatatcgtcaacataaatcaacactgccaagaaaatattaccacgatcaagggtgaagagtgtataatcagccttagattgaagaaaaccatagttgataagggacaaagacaatttggcgaaccaatttcttggagattgacgcaaaccataaagtgatttatgcaagcgacatacttaggacagagaatcagcatgaaaaccttgaggaaggcgcatgtatacttcatcgtgaagatctccatgtagaaatgcattatgaacatccaattgatgtatttcccaattcttagcaacaacaacagatagaaatgttcgaacactcaccatcttagtgacaggtccaaatgtctccgtaaggtcttcaccatctacttgatgatttccaacaacgacaagtctagctttgaagcgttccactgtgccatcagatttgtattttatacgataaatccacttacatgggctagcatgttttcttggagggagaggagtaaggctccatgtattgttatcttgaagagctttgatttcagcttgcattgcttcacatcatcgtgcatcagctgcagtttctttataggatgagggctcaactcctgtagacaaagttgccaaataattgatgtgttttgggggtaaaaggtgaattagaaagaaaattctgaatgggataccttacaccagagaatacagatggactgagtgacttggattgaagtatatgtgtcttcgtatggttacaagaataatcttccaaatatttgggaggacgacgtatacagtgagggagagtgatgtcattcaaacttggtgcagttggatatatggaattcgggtgcggtgtaggttggtatgtttgtggggaattctgatttgatgaagattggtttagtggggttaagtcgtaatttggagatatagaatgactatcgcccccctatcgttggaagtaaggtgatttggtatatcagtaggagaaggtgaaggttctaaaggtgtttctggatggtcatcggatgggataatcacggttgggagttgcatgtcaactggggtagaggaagaagtgcttggtgagacattagcaaaaggaaaagtagaattcttgaaagtgaacatcaccagatacaaatgtactgttatcatcaagatccaacaaacaccatcccttctttctaagtggatatttgaacaatatgcaacatcttgatcgagcagaaaacttatctgttggtttgggacgggttgaagcataacataaacatccaaatgtgcgcaaatgagcataagatggagagcgcccgtacaacaatttatatgaagttctgccttgaagagttttgcttggagttctattaattagatgtgcagcagtgagaatacagtccccccaaaattccaagggaagattgctttgaaaacggagagcgcaagccacattgaggattgttctatgtttacgttcaatacgtctgttttgttgaggggtgtcaatgcatgaagtttgatgaatgatgccaagattggaatataatgtacacattgaggttgaaaggaattcagatccattatctgttctaagaacttgtattatcttcccaaattgtgtctttatcatagcaaaaaaatgagtaagtaaattttgagtttccaatttctttgccataagataaagccatgtactgcgactataatcatccaccaacgtgagaaaataatgagcaccggttattgttgacattctatatggaccccatatatcacaatggacaagttgaaaacaactagttgttttcttactgcttgaaggaaaaggggatcgattcattttggcctgacaacatacatcacaaagatgaactttatttttgctaatgccagaagaaatacaaggaataaaggaaagaacatcattggagggatgacccaaatgtttgtgccacaagtcaggatgtgtttgagttacgtgagcttgatgggtagactggtgaaacacatatacgccattgaccaaatcacccaatccaatctgcatcttctgagtgaggtcctgtaggaaacaagtggaagtattaaaagtgatagtggcattagatgattttatcaaatgggagacaaaaagtaaattgcacgtaaggttaggaacaagaagaacattgtgcaaggtcaattgggaagatagatatacggtgccttgttgaatggcaaaggttgttgaaccatcaggtaacccaaccggagatggtggaatggtgatgaggtcatgaagcaagttaatgttactagtcatatgttgagaagctccactgtcaattaaccaagaaggtttaagggcattaccagtcaagtttgtgattcatgtgcgggcttgtcaacgagagacaacaatttttgtacgacatctggagttagagaggcagatgatgtagcaaaattaatggttgaaggagtaggcaggagtcctgacagaagcgttgcatgagctgcggcagaaggatttctagacttgaaattgcttgtaggttttggaggaaatccataaagaaagaaacattttgagacatcatggtttggccgaccatagtgagtgcacacatgtgttggaggtatttccctaggtggcgtggatgtagttgacttggtttggagtgcatatccaacagcatcaacacggtcagtggatgaacgaactatggttttgtgtgtcttttcctgagtggccatggagtagatacggtttaaggagggcaaaaggttggtattgaggatttgagaacggattataccaaaggtggcttcatcaaggcccatgagaaattgataaacccgatcattgtttatgatggtgttgagcagcttagttaccggacactggtcaccattggagcacgggtcagagatgtagtgttcctcaagctcatcccatatagctcgaagtcgagtgtagtatgtactgatggaagagccttgttgttttatagtgggaagaagacttttgagctgatatatacgaggaatattggccacagagtatctgtcttttaaatcatcccagagttgcttagcagtagggaaatatttgatgaatgagcaaagttgtggatcgatagtattgggaatccatccagagatcatggaattgctcattcgccaagcatgaccttcatcagagtttgcatcagttggtgcatgtatggttcccatgacgaatcccagtttgtttttagcatcaagagagtttttcatggccctgctccatgtatcataattggagtcaccacgaagtaggatattagtgagaagaacaccagggctatcagcagaggaaaggtagaagggagaacgaggatcagtagttttgagggtaatagcagtcccagatgacgtgggaatggtagtagaggaggaagtaggtggaagatcatggttaggattttcgtctgtcatgatgtgggaaggaaaatgaggttactgaaaaaaatggaaggcctacatcgtacgctctgataccatattaaatctgtggaagtgtgtttaatgtaaaacttggcttgctttcattaacgttgctgtcatgaatatatacagaaaataggcaaccaattggttacaccatattagctaaactatctaactaacttcatatcgtaacaactatttaaaacttacatcaaaaatagctaacaactaacagtaagcctagctaacaaacagtaagataacagatactcagatatattcgaaacaaatactcagatatcttcaatatcttcttttacatcatttgtagatgtcatctcatcttttaaagaagctatattggtgagcttctaaaaattagccaatggagagcttatttttgcttatggaaatctcattttttttcttattttctttttttagaagtgcttctaaagaagcttatccaaacatgttctatcttatgtgttaagccagaaaaagagaaaacttgtcacaagtagaatgctaggtattgaataattattgattaaaaggagaatgtgatgagggaagagaagcccactcctactacaaggaagagtgaagtgaagtttctcaactcctcttgtggctgcttttctagtcttatctccaatttgtagcactccatgttagtaatactctttatccatgtcctctttttaaaatactaaagtgcccctgcttttgattcaaatgacatgattgccaacgtgcaatacaactactcttgttttagacgactagactatacaattcaaaaaaattacgaaaatgatttatttgatgatatatgaatcatatgagagtttcacatcaatcaagaaccaaatcatcaatgcatgattcttcttggaagatacgtctaatggaagacagaatatggagagaaatgctaatttcctactttttgatatattcttttaaatacatactttattattggcttagattgattgaaaaatacattttttggtggtacaatatcttatttaacgagtctatcttgtttttttagttattaataaattttaaacaataatagagtaggttttagagagccttttgctaacattttgcccataatgtatgtatcctttatactatcttctaatcaatcacacactatcatttacaataagtttttttttatagtttttttctataataactagcttaaaagtcatattaagaaattttgatttatggactgaaagtttatggcatctcatgcttgccaaatatttgtgtgtgctaattggctaaaatttgtttacagttattggatcaacttagttgttttcctctgatatatcttgtttccctcatcttaaatgtaacagaaggtgtactttactagcacttctggatttgcaatctaaaggtaatctttacaagaaagaaacatgcagtttttatgttaagcttattctactctacagtttcaagtgctcaaaccgaagatattcagagaggaaccatgttgtttcgtcaagcttgtattggatgcaatgatgcaggaagaaacataatacaactagtgagtatccccttatgcatgacatttctttatttattttcttccaaaattgaaattaatttgttctttcttccttattcttttccactattttaacttacagggggtaactctatttacaaaggatttgtagaggtaaatggagtaaacctaagcaccctcattctgtgaattgaaaatatggaatagaaagcactaaaaaattcagagctcatttttttcatacttaatgaagaatgaaaataatgtatcaattatcaactgtttcctatgcaagttgcaaactgctcttgcctaagttgaaggcatgaatcaatatatctttgttgtaaattgctagcataacaagttctttaaattatcaactaatgtgaatttgaaagtcacaggttgttggcctctagcaacagctgtagcaaacttttgagtctttttggtatatctttgaaataatccaaatgttattgctcaacagaaatggagttgatatagaagaagcaatctatcgtgtcacatactatggcaaaggacgaatgccatcaagttatcttgtaggattagctctctatgtattcaaatggatatgtaggaaagagggaaaaagacaactcattaaattattagttactttaaatcataaaaacataaatagattattaagtttctatttgagtaaaatcaatcttgaccatttatgtgtacctttgtatggttaaaacttcacttacctttcactttcactaaatgtacatacatatacatttcatcattcacattttatgtttactaatttaaataatttgtacacatatctagattctacttggtcaactaatatggtctaactcagttggttggttgatcagtgtacgtgagtattgtaaattgtctgatacttgtttttggtatcaaccatgaagacaagaatttttaatatcaaaactgcttattggatcatcctttggaaactatttgaaatatgccaaacaacagaatttatgttcataaaaaatgggctaaaaaaactacaaactcaggcagcattattagacattagctagtgtaacatgttctcccatttggattcgtcctgttaaattgtacactacatgtatattagatgttggaagctggattcagtcctcctgtttatcatttaactttaattgtaatctaggtactaaatattgttattaaattgaattgttaaatgtgtcttccttgggatgtcataaataaactcttaaaaatcattctttaccttgagtagttcttaggaaactactataggctgctgtttgctgactattttttttcagttgcacacatcaaaggtaagcacctgatcgaacgaattgttgttggtatcattcccaaggttgtgacagctgatacatcagatattcagcaaacaatatggcctcgagcggcagcagcaataggttagctgcattactaatgcaaagttgttcatcattcttgtattattttcaacgcaaaaccgtttaagcctattccttgcctattgaatatgcaatacttgttttcaaactgctatttctgatggatgaacgaattgccacaactatactatgttttgaaatgtaatggcgtatgaacatatgttaaaagtaattgtttcctccttaactaggaatgaccaacctaccttgagtacaattgttcatgtagagtctcattccaatcttctatttaaataaaaaaataaaaataaagaaaagcaaaaacaaagtttccttctgtctcattcaaatagaaggtcaaatatgcaagtcatttcaagggttgatgtatttggtattgcttgcttgatgtaccactatctgaattctgaagcaaaaacaagtttccttttgtctcttttgcttgatacatgagtatgtatgcttaaaatctgccaatcttttggcttatgtaggggtgcctcctcacttcactttataagttatccattattatatataataacctcaaaacaagaaaagatggtgtgattgaaaaatgtagggtgcaggatctgatcatgcaaaattaacaattacttgttttccacagaacgcttgtggagtcacagagattgtacatcagcaaatgctaacatgattgcattgtcacgattgcattactttagatgtgaattaagtagacgagggttccagctgctcctgtcaataattttaatgcaagaactactcttgttggtccagcctcatggtttcaacaataaacttatcatatatgcttcatgtatgtctacactgctgtcaatgtaactcatgtttatctagcttcgaattagtgaacgttagagctttgtgcttaattcacaactttcacattgtaagttattattggattcaataaataatacttgttcacttgtctatgatctgtttctacatgtaaatttaatggacttgtgaatgcttgcgcttgttcaataagaaacctgtaaatttaattcacaacttttatttagttactacgtggttttgcttagtcaaaattcagtaccaaaattaattttgtaatattttataacaatcgatctgtttgggtctgcatgattgaaattgcaagtttaatttggtttgatataaacaaaacaaacatttaaaaaaaattaacattatttatcaccgaaaaccatattaaaatcaacaacagttttcgaacaaaatcgtcttacaatctgcagagtctaagacgattttcaagcaaaatcgtcttagaatgtcacgattctaagacaatttttggatgaaaaccgtcgtcgaatatcaacatttttaacatttttaatcaacaagtaaatctatttaagacggtttgcagaaccgatgtagaaacgaacaaactaagatagttcaagaacattcgtggaaagtgttcaatttccacgacgacagttgcaaagaccatttgtgaatcgttgttaaaagtactaaataatcgatatcaaaaatatattttctagtagtgaggtcctcttgtccaaacaaattgtaaatctaaaggcaaaagatcaaattcttttgcacaaattattttttaaaattttctttttaaaaaaagcttataattaaaaaagtgattaccataagtatattttattgaagatcaataatcatattctagcaaagtataatcactttggatgacaaagttttccttccaaataattgaagcagttacatattcaagattcaaacttaaaacttttgattttattaaaacaaccttacatctattatctattgatacacatgtttgacagtaaaagtgactattattattttaaatatataaatcaaactaaccatgcattgatttgaatgaatcccaaggttttgaatgagtgcaaacaaagccttaattgaaatgcttggtttttaagggtatatttgagtgtcaagtcaaaatttataacaaatttgaccttttttctgggtttaattatctttcatatccttatagttgcaacaacttcttttttaattcatacatcttaaaacatctcattttgatttttatagttatatttttttcttactttttttattatcgtcattaagtgtcaactaataccacaccacgcatttgaaaggaagtgacgtagctcatttaatcaacattcatttcaaatggcattaggtaattttagatggcgaactgaaaggataaacaaatattacaattacagaaactaaaatgagatattttaagggtaataaacttttttctaaatctaatgtttatgtttgatagacagccctgaagaccatggcatgtccatgagcctacttcccagccccaaatgccaaactccttatttcttgggcctgtggcctggcaacctactccacacagtcacacataaagctttcttaatcccctttggtagtaatatcaaacatacatatcaattagagtgtgttcgattacagagaaagagagtaagaaaaaaaaaagaaataaataataaaataacgtgagactcgtatttttactttaatttaaaaattttatctcaatttattttctttttatttcttttctctccgctgaatagatctttaatgtctactaaactatataaaaatgttttttttctcgaatacttaggaaaaatgggctagtgataattaactgtctcatttagtgggttaaccaacgcaagcaaattaaaacttttgacttagataaagcatctctgaaaaaagttacgagtcaaaatgagccaagcgtgggggttataacttcgaaggatgattctcactaaaccctaggtaacatgcatgatgacacattgaatgaaatgcgtgaacatagatccccaaaacatttaacaaattgaataatgctcacaaatcacgccatagctatgtatagctctcccttttgtgctctgccctagcccttcaagtatataaaaatatcagtaaagattcccacagcaagagcaatagtcctcccaagccccaacagccaaccctataatcaaaacgggacaaactagatctctattcatttttcccatgcgtaaatgtagagaaaaaaggtcaaagactagactaatcaagaggcattgggtggtacaacttgtcactttatagattgttgccatgtgccactttgtgcttggtatcatggaatttccctaagcatgacagcgagatccgaatccgtgggtatccgtccaaatccgttccaattttaatgaaaaaaaatcgaatttttcaggttcggattcgggttcggattttccccgatagccaaaagcgggggtggggacgggtatggggttactgatacccgtcccgcccccgcccctcgtcccataataaataatattaaaaaaataaaaaaatatattattttctaattttttttaattgaattgattgattttgttttgtaattttaaaattatgattccatattttaaatgtgggtttgttattattattttttgttacataattaactttttttatccgatttttcaataaaaaaaggtatattattttttttattttttaaattttaatcaaatagcgggggcggggtgggaaaaacctgactccaagcaggggccgaaatgggaatgggttttaaaacccgacgacgtgggggcgggggcggggagcgagtttgggggcggatggggacggggaatgcaatatccgcctccgtcccgccctgttgccatgcctaaatttccctcaaggcaagggtttcttcacctttgcatatggtcgatttgatgaattaatctttaaaatagctttatacacatagcaaattgtgtttttaattacattcttgtttttttttttttttttgnnnnnnnnnntttttttttttttttttttcatatactattgattggagatagatacttcttttctctttgtcccccaatgcttgtttagaaaggaaataacttgaaatagatttttgtcatgttatattcaacaattacgttctcgaacattactgaacaggtaaatcaactagtacataattattttaattttaccaataatttttaaaatttgtgttttgattataattatattaaataatcagaagaaaattgttcataatgattcaatatgaggaattgcctcccgtaaatatatatgatttgtatgtaaaaggagaaaaaaaaaaaaatacttctcgaaccatgctttaggatctccacgttgcatccatgcatgccaaattgatggaacacaaacgagtcccttttatttaattctttaatagacaatcacaatagtaatattaagggagtacaaggatactctaacccacgttcataataatccttgataatttctacaagctagcttaacacattaaagacttaaggaagatataagttgattggatgcttaaaaaatataaagatttataataaattaacaattaatatttatcaataaaaaaacattaaagactatagaggataagaaaattaaaaactatttatcaattaatattggaaaaccaagttcattgtctgaattttcatgagatccaagtctaatcaaatcaatttccccatttttaaatatcacctagttcttttatggcgttcttattattattattttttttttgtaagtgacgtaaagaagaaaacaaattaagcacgggtgaaaaccaccctatctctatcagctaaactaacaaatgactaatagcaactggtgcttgccatatctagagaaatctttcattgctgctatagctcttgtcttggccatatgtaatccaccatttgattggcttctatggtgttcttgtttgggtgtatttaggggaaaataatatagagaagagagaaatagaagaaaaaaatatattaaagattggatggaaggaagtttaatacatgtttttttcttttgcttgatttttaaagattatataatttttataacaaaaaataataaataattttatattaagaaaaatataatataatgtttataccgctaaaaggaaaaaaagttgtagaaaaattatcataagttacaaattttcatcttcataaaaatatttttttaagaaaattctttttctaaatttaagctaggatccaaaacattcagcttattttggaaacatttttttttctttctaaaaaaacagctaagacttgggattgtaattataagctgtccagaattatttttaattttttttttttgtaaagttttatttttaatcctttagagtcaacatctccaatattactcaactctttcccatatttaatacctgttgcaaccaattcaatgacgtcaactacacatgtaaaatataaatacattgaatcaatcagctaattgattggtcaacagtaattttaattgcaatggtaagaacaccatcacatcattcgaaagtacttgctcatttcaaacataaatgttaattggtttgttaactttaggtagataccaaaacaattagtaaaaattacaaagatggcaactgggaatgttaaggtatctaatatttggaaggagtgaaatagatgtcgatctccttcacatttctaaagctccaatttaaacttctaaaccgagcaagagaatataaagtaaataattttaattattgataaaaaaaatgatattccttacacattcatacatgattaattatgtatatatacataatattaattttgatttttttattaataactgagattaatacattactatttaaagtgagactggcttattctagctagaaaagccaaattcatataattctctattctaacnnnnnnnnnnnnnnnnnnnnnnnnnnnnnnnnnnnnnnnnnnnnnnnnnnnnnnnnnnnnnnnnnnnnnnnnnnnnnnnnactttttttttttttatagacgactattggtattcttaaaagaatcactatctaagtggtaatgtttttctttggaaaatttaatataactgtatattcaagatttagatttgaggtcattaattaagataaaataatttcattccaattaatcacagactcaagtggtagctcttcttgttttcatcttggaaatttcaatgttattatttaattactatatgtaattctattttcttaaattgaaaaaaaaatccaaattaaaatttagtcaaaacagattttctctatcaaaattaggttgggatatacgaatatttgcaatttctaatttaattgtcatttcaaatctcaataaaaatgacacatgcgtatgaaaaaaaaatcttttatatggagctttttttttggaaggccttatatatggagcatatgtctagttgttaaatatatatatatatatatatatatattaatttactgatatgccaccttttactcgaggaaacaaggaagaaaaaaaagtaaaatttgaatcctatatatattttggagataatcgataatatgaatcgaagtatgtatttcatttttgtttccgggtgtcttatatttgaaaaagatcacagaaatggaattaattgttactaaactaatattagttaatatctttgagcttctttaattctggttgctcagtgtttttctaatgatctagtcgactgtctcctgtgtggttgaagtgaaatggagcaggtgaaacacaagttgggcatgataaatgtgattttctctaaacagtatttaagatttaccctgatttaggtagaggctaggacaaacgaactgtgagattgaaggcatggaaagcaaaagggcatcttaattaattagaaaacctatctatatatgtaggagttaattgaataatcaaacgaacaagtgggacccaaagaaagaagaaaaaaaataaaagaagagaaccctaatacgtttggtaaagggagcagccctaatatgaagtgtttttattcacaaccaccgcatacaagtcacaactaccttaatcaattgaagatatcaaactgattattgagctaaaacacacaaaagcaaaaccatgtgactctatccactataatcagaagaactatttaaaaaaagatgcatatatgtggtccttgccttccatttggtctgtccatatgtcattgtttgtcaaccaaatacaccaaaaacagagaaaccacccaaagctaaagacaaaatgagggcaccctcaactgattccaccaacctggccaatttatacccctttttattacatctaattaccagacattatttaattgtgattacgtggatgtagggtcgaagtgctctgaaagcacatgggaacattatctttatcacctgtttagaacaagattaatcaaatccaaagaaactcaaaatatggtgctaaaccattgtcaaactttctagtaacgcgcttctataatttcaagtactatggatttggattctatcgtacgtgttaactaannnnnnnnnnnnnnnnnnnnnnnnnnnnnnnnnnnnnnnnnnnnnnnnnnnnnnnnnnnnnnnnnnnnnnnnnnnnnnnnnnnnnnnnnnnnnnnnnnnnnnnnnnnnnnnnnnnnnnnnnnnnnnnnnnnnnnnnnnnnnnnnnnnnnnnnnnnnnnnnnnnnnnnnnnnnnnnnnnnnnnnnnnnnnnnnnnnnnnnnnnnnnnnnnnnnnnnnnnnnnnnnnnnnnnnnnnnnnnnnnnnnnnnnnnnnnnnnnnnnnnnnnnnnnnnnnnnnnnnnnnnnnnnnnnnnnnnnnnnnnnnnnnnnnnnnnnnnnnnnnnnnnnnnnnnnnnnnnnnnnnnnnnnnnnnnnnnnnnnnnnnnnnnnnnnnnnnnnnnnnnnnnnnnnnnnnnnnnnnnnnnnnnnnnnnnnnnnnnnnnnnnnnnnnnnnnnnnnnnnnnnnnnnnnnnnnnnnnnnnnnnnnnnnnnnnnnnnnnnnnnnnnnnnnnnnnnnnnnnnnnnnnnnnnnnnnnnnnnnnnnnnnnnnnnnnnnnaatattcatgataaaattacatattgcttgacaataagaagataagattcaaatccaaaccacataattattatctaaaaaaatcataaaattattatgagcaaaaggtgaatgagttgagccataacttataatcaaatcgtaaactattaattatatggatagttcaaaataatgattagtcgtgcagttaatttatatgtacttgaccaataaatcctgatttagatcttatgggaaagttattttctcaccctaactactatatatatataggcgtatcccaacaacaacaaaaatagtaaggcgtatataaattaaatattgttttattcatttgatctatatatcaaatatcaaatatatagttgaacaaactttattttttgtccttatatttgaaaattatttattttaattcttatacatatattatttttaattttttttagtccttatgagtttacnnnnnnnnnnnnnnnnnnnnnnnnnnnnnnnnnnnnnataaaaggaattaaaaatagtatgcatatataaagactaaaaaaaattaaaatgacatgggtagaaattaaaatagataattttaaatataaaaattaaaagataaacataaaatgtatgcacctataagaactaaacgaacaattaaaccattaaatatttattgcatgtttactagaggtctctcatcttttcccccaagaaaaggatctctcatccaagaggaggaccagtggtacttttttgctaacatcagtttagcttctaatataaacttttccaatttcgttttaattaataatttcttaaggaccattatgtggtcccctttcataccagttataatatgattaacaattgtaaaccctacagagtgtgtgtgtgtgagagagagagagagagagagagagagagagagagagagagagagagaaaggagaggaaaaggaagtcattgtcaatagctgtaagaaggaccaaaacctaccattaaatactccctctatggcacagtagtgaaagaaaagagacattgagctgcgcacaggcattcatatatggatcagtatggagataaagaggatcacgagggtcttcctttaattactccaaacatgcatggcttgcttgttcccttttttgttaatttctatgtatcaagatgttgttgttagtaccctctcacaggatttgcttcaatgaaaggggttcatcactcttttcatcacaagtatgttggtttgagaggttgaagctgccagcatgatctggtaaaccacacactctttttttttttttctcatctcatgcctaatttttaaacactagtcactagagaaaataatggtgaaaaatccatctattcattttttttcaaattcaaggtttccagtatgtatcattaatggtggaaaaaagtgatggaattttgtaaaacatgtgttaagtttaccttctttttttttttttttcaagttttcattttctttaagtttctgagccaagaattaatcttaatgaaaggaaaccgaccaaaagggcaatttggttatcataagatgtggtttccatcaggtcatcttgcagcttcaatcactcaataaccaacagattagtctctcaagtgatgaattctggtactgttcatgctacaatttcaatttcaggtattaaatttattttctgatattgtttatttcttttaatttcaactgtatctttgtatagacacatgccttcttagtgtatattctcttcccagtattaattattagtcacttttccacatatacatattcattgacatatttgttaataacgaaacaaaatgttgtctgtataaaaattaccaaaagcaaaaagatggaagagtatatggtcatatataagacaaaatatgaacttttaataaattatatatatagctagtgaataattcatgacctgcatgaatttgacatattatggttaataattagtacacaatactatctgtgtatatatgtgtggttctacaacatgaaagtgatctatctaacagaaataatcgttcacgtatatttgtttctagttgtactcatttgtctcataatctcaacaaccttgatctctaacctttgttggggatgcgttttctgatacaagtatagagacaaattaatgaaagcggtttaatttgttagtttcctgtgtagacaactgtatgtgtggtccaatctacctaagccttctggaatatgtatgttcattctattaattcagcatctgctagctagaaaagctaatttggattatattcatatgatagataaagatccaccgactgaaaatgttctagtgtaggcaattgaatggagtactattttgcattttcctttttttcccttaaatagatcggtgctctcagtagatttattttctgtcttaacccttaattagagaaaagaaatctttagttaatttgaaatttggttaataggtaaataaaatctcatagaaaatattttcactaaaaattaaattaagataatatccaaataatttaatttaatttcagcacattaatcattatgcacaataacatgatttcacaatcgatattaatttcatcacatacatatggttttagattgtgatacagttgcaattatatattgtgactgttacaaagttgatatcaattgctaccataatggtccgaaaacatgacctcatgctcagtcttagcaataattgcaactgagaaaatgttgtgaagtgtgaacattaaaagagacaacgtacaaaatgttgtcctttttgattaatttgggagtatatattttttagatatatttgcacataaaagataaatataattgtatacagtgttacatgccgtatcgattaattttttaatgttttcaaataatggaattactgcaattaagacatggcagcaacatatcatgtgatgcagttcaaatctgtttattcaaaactggctatatatgactaatgtgaacaaatattctctctacttttgtgaattaaacagcttaagatttcatttgaaatattgatggcaattttacatggtagcctcttctagtaagtagctagtcctccatatatgatactcaaattcagtgtgtatatatatataagctggtgcgttaggttgtgtttaactgccgtttgatgaagaggctaagggatatatttgaagaaggaatgtcttaaaatcaaaaggaaaaataaaatttctatactatcacttgtgtttagagctaattaagttttgattgcgatttaccatgccctaagattgcatttgataaaatttgaaattcaactaacttatttgtgtgctatgcgtgcctttcatccagctgcttggaaattctgtttgacatggattcttagaatgcctgtgatatctcctattaaattaatatacacagttgttgcagattgttgctttttttattttgggtatgacaaaggagaaatccgtgaaatgggttgacaaataaattgtgtttaattaatagtacaaggctgattataattatcaaattgctgtgttaacttacaaatgaattaacgcattagggtcagtatatagtggtgaaaggttagctagaatagaagcacaaaaacttaaatttgatccttgttgtcgttatacataaaagaaaaaaaaaaaaaagcttacaagtgaatctagatgtggtttatattttcttgtaaaataatataaacatcattttggttgctttagtttaactaaataatgtaaaaatatctctaagatcaattcatggtcacaaacacatacatatccacgcccatttgtgaacaaatatctcaagagattggacacacacatatccacgctcatttgtgtcacaaacatctgaagattggaaacacatatattttatcatataagaataattattttatgtgaaaatgatcaattttaaccgttaaattaaaataaaaggttaaatttaagacatttaaatttaaattcaaattttatttaatcataaaaattttaaaaaattattaaatagaaaatcaaatatcttaaaattttaatttatatcttttacctattttttttataatttatgtcacaatgatgacaacagcaaagagtgttaataacaatgacaatgatcatagcggtatttacaatagtggtggtgacggttgatgatcatggagatgatgattgtcatagcgatcatgacagttatgacagaaacgatcatattaatgacggtatttatattggttataaatttttttagatatattttagaatgatataaattaaatctttaaaatatttgattatttgtttagtaaatattttagagattttatgggtgaataaaattttaatttgaatgtatatgtatttcttcaagtattttttcaggttttgaatataagtaacaaaaaatatcttattttttttatcttaaatataagcaaatcttaattacttatattttatttaataagactctctctaaatatttttcacttaataaggccaaagattatttttatgttcgatatcaaaattctagtccgaatgatggtctagaaaaaaatgtttatttttaattaaaataacacaatttaataaaattaactgattttttttaataaatactcgaaaccggaggaagtacttcacgttatttgagctttctgaatttattatgacactttactcagcagaatttttttgggtctgggctgaaaattttaaaattagaagaaaaactagaaacgagccaaaagtttgcgttctactaatttagggtctcttattttttcatatttaatttgtcctatatttgcttgtgtcttgtcatgtgccatgccttcaaatttactggttttccatcgactgtttgagagactattatactaattttcgagtctttttactctaaaacaaatgtgatgtttagaggattaagtctgtaattatgtctattaattgaaaaattaaaataaaaaataagttatgtagtaaaaatatggaacagatttacaaatttagcaatatatatatatatatatatatatatatatatatgtatgtgcatgtatatatttatcataatttcgattgttaatttttttaaactgattttaattaactttatgttttaccttctaaagtatactcctcgatcgtctggaaggaatcaaattctttgaagaaaaaacttctatggtttctccctagctggttttggttctccttgaagcagttcaatggttggatggaattgaacctcaacatttttgtattcattcttcgatgggtgaggtgataagtattcaattgctttgtatataaattgagtttcaacgttcctttggagtgataaatgttatcataaactcatagtgaaaatggcttgtatataagcctcttagagttctttttaatttattttaataaattccataaaagttatcaaaataagctctttttttataaataaaaaaaaagttcacaattaagcttgggaataaatgttcaattaaacagtttatccaaatacacttatatgctagcaccttttttttgttttaagtttagtgagtcaaatttctgaatattcctatgacttggggttcctatgcatgcagttcgagttttctatataaactgtcaccatgcctcctggcaaaatcactttcaaccaagttatgtgccaccatgcctcatggcaaaattactttcaaccaagttatgtgccaccatgccacacacacacacacacacaataaaggaaaagctgtaaaggaaaacaataaatgatagaaattgtagaaaaaagtaataaaataaatgtaggataaaataggcttgtattttttattgattgtgttgttaaatttgaagtacattgtacaccttggttgtggacaagggaaacccacacattaaaggcaaatgttcttttgtgactctactttggctatcacaccccatcgaccaaaagagtaagttaaaacaagagaaggatcaaacaattaataatggaaacaaacactcaacaagaaatgtcgcgttttctctaagcttgaaagcaaaacaacttaaccaaattagttcaccattgtttataaccataaaataagcaaaccaacttatcaaaataagaaaatagatagattatatacttatgcatttttagtttttgtgaattatgtacatatgcatgtttagatagctactagaattgagactttggaactaaaaaaacatatggtaaaaattgaaaaaaatggaaagctatttattgttttgactttcaacaatttaatccatacacagttttacagtattttccaaaccacatgttaatgccaatttgtctctatttttcctattattacatcagaatattattcatatcaatattacctacccatactacatgcaacaagacaattttatatccattgacagaaccatgatcacccatcaaaaatcgtgtagaactcgatcactatgattaagagtgacttgcatttcgatctctgacatctgcgaccaccagaccggtggctagttcaataggtcaacattttcttcattaactcttgcagcaacaccaactctcatggatcgaatctcagggcaccatgtacggcaacctttagcattattgaaaaaattcaagtttcatatcggatggtcaagatagattatataagtgagagacaatcttttgggttgaattacacccaaattcattctaaaaaatataagatggtatcataactaatcctaaatccactaatggaaatctctctcttaaagattccatttctacctaaaaataccaaataacaaagttagtatataagaaaactattaaactcaacgcaacaacagtcctgttcagaaaattgacgatgattttccatcttggcttcttgtttgtggtggctttacaatcaacaatgacctgttcttcttaacagttccttgaataactccaaaaatacatgatgttttttgtctctttttcacataaaaccctcttaagaacctgtcttacgtaaactannnnnnnnnnnnnnnnnnncttgttagagaaaacagtaaaaaaaaaaaaaaaaaaaaatcttgtagtgtgagtttacatctttgagactgctaaatgatgtgataaattcacttttggttgtgaacgccaattagatttatgaagccaaagtcaggtgtaattggtcgcattttccggtcatctgaaaaaaaaaataatcatgtaaggcattaacaaattgaccttaaaaagacatgttatcggaaaacaatattcgtcggagatttataaagttgttggttcgaaacgctcgtcaatagtcccagccaaactggaccgtcgcattcacgtgttgatgagctggtgaaaagaacttacggtaatttgacatgttagatatttttacggtcttataagatgaaattaaaaatgttgcaatttttagaacgcttaagtttaatagatgacatgcttcctgcataggattacatatttttaattgataaaatttattatttcatatttatactaactatacaacagaaaatattagacaacccctattgtgtataacctagttttgtccttaaccacatacaagaaaaaattatcaagattgaaaatcaactttaagtttctgagcacaatcatggtagatttaggatgatcgtgatgaattttgtatgaccgtgataaattttgtacaaacttcaaggagtatgaaacatttatattaagaattatattaatttcttagattattgaaaaaaattaaaatcaattcaaatgtccataatataagttaattttcaaaatatttgtctcctaaaattaaaggagtttgtacaaacaaataaaagtacataataaaacttaaataaaattaataataataaaattactgttataaaaaatagattattttactataatcacttttatagagattgtcaatttaacatactgtaaaaaaatatcaaaaaaaattaagtgaatgaatgaaaaatatatatttaatatcacatacttaaatgatttaaagtctatataatattatattcacgttaatttatgttaaattttatctgatatcacattcattatctgataaaataattttcaaaaaaaatatttttaataatttttaaacaatgaaagttagttatgaatttaattatttaatttcaaatattctcaatttcaataaaatatttataacattcaattattagttaaaaataaataaacgtgttctattattttacctcctgcagactgaaatcaaatttcaaagatccacttttttttatcaaaatttttacgataatctggatagtaaaagccaagaaaatcaaatgggataattggcttaacttgccaatcaattttttaaagagtgcataattccatcttcccgaaggaatttgcctttttggacacctaatcatctggctggaaaaataaaacaaagtgggcagtaacaaaatcattataaaagacataagattataaggtaacacactaaccagaatttgattaggcttgaatgctttgacctttatcttacacaccaatgtcagacaacaaatagtcaacagtttatattttttgttctcagatatacccatgagatccttgaataaagaacaccaattagtcaacatcatcaattagaagtgtaaataggataatgttttacacaaataacatgaaatcacataaatttaaacatcattagcaagctagaataaatggacttcctacaccagccccattcctgatcaaaatcgatcaaatgcgttcaatgccaggtaaaatgtatgaggtaataaactcctgacaaatgttgggtatcatgcaaatcagatttttaggttttaagtattggaatataagtgtgaaggcgaaatctgatattagttagaacttgaaaagttgaataagatataaattgaaaaaaaaaaaacccataaacatattttaggttaaagtgttcaaaaaacaaaataatgacaaaatttgaataaactcttttccctgacaatgttgtggtgaataagatttttaggttttaaaacttataaactgaataatcagagagaccactgttataaaaaactcgagcaagtgttaattttcctacccccacccattccatggatccctaacatctggacaccatcattggctttgttacctatcacgggtattttttttttaattatcatttagggatagttttcaaattaattactgaaaaggggtattacgacttcctgtcaccatttttattttctttttaattttttaaattgaagtagtaaaaaaatttacaacttaagtacagttattttttttagatttacgatttcaaaatcgtaaaaatattttttttattttttacaattttaaacaagtcgtaaatacttcaaagtcataaatatatttaggacttcaaaatatgttgcaatttttttccgatcaagctttcttttgaaaaggcttttttttattatatttttattattgttacggttggaagtcctaannnnnnnnnnnnnnnnnnnnnnnnnnnnnnnnnnnnnnnnnnnnnnnnnnnnnnnnnnnnnnnnnnnnnnnnnnnnnnnnnnnnnnnnnnnnnnnnnnnnnnnnnnnnnnnnnnnnnnnnnnnnnnnnnnnnnnnnnnnnnnnnnnnnnnnnnnnnnnnnnnnnnnnnnnnnnnnnnnnnnnnnnnnnnnnnnnnnnnnnnnnnnnnnnnnnnnnnnnnnnnnnnnnnnnnnnnnnnnnnnnnnnnnnnnnnnnnnnnnnnnnnnnnnnnnnnnnnnnnnnnnnnnnnnnnnnnnnnnnnnnnnnnnnnnnnnnnnnnnnnnnnnnnnnnnnnnnnnnnnctcattttttgactttttgaattaaaccaatggatttgttggttttatattcacaagtatatagaaaccttccacgaagatttataaaatatatatcttcgatattagttgctcttctaacatgccttataaaattatacattatttcattaaactggtaacaattgaataaaactattgtatttgcgttagcgtatcttcttcagtctaatatatagtaaagcaccaccattttgactttttgaaattaaaccaaaagatttgttggttttatttacctacatttggaaaccttccacagtataaagaaagatttctnnnnnnnnnnnnnnnnnnnnnnnnnnnnnnnnnnnnnnnnnnnnnnnnttaaaattttatttataaaacttaaaaattaatataccaaaattatgaaaatattaaacaaaacttaaaaatttatttattaaatagttaaattaaaattttatttgcaattttaaaaaataaaaaaacttaagaattaaagaaacataacgaaaaaaaaaagtgaaactgtggaaatagtaaagatgtttacgacttccaatagtaataataataaaaaaataataaaaaacctttttaaaagaaagtttgagcggaaaaaaaaaactgtgcatattttgaagtcctaaatatatttaggaattcgaaatcataaatctatttacaacttgtttaaaattgtaaaaaaaaatctttttacgacttcaaagtcgtaaatttaaaaaaaataactgtactcaagtcgtaaaattttttatgatttcagtttaaaaaataaaaaaaaaaatggtgtcaggaagtcgtaactaagtatgttacgatttacccatttttagtaattaatttgaaaactatcctaaatggtaattaaaaaaaaatacccctaataggaaacaaaacccaccatcatcagacctatcatccaaaagcttccttacttctggcacttgtgactccagtccaaccgggtgatctgcaacatataaataagcatgattaatcttgctggagaccctctcaaaaatcttcccaataaactcattcgtatccagctctgtttcaaacaaaaaaaattcaataaagttaaactaaaagccttctatcagtagtagactagtagttctatcccgactcgaacagaattgatttaaggaaacaatatatgtggtctatacctaaaaaaaccctgtattcatgccttgatatgtaatgtaagtcgtcaaggttaacaaacttttcgtttctctttaaattttaaagtcaaaatattagacctgtaagacttaatccaactaaaacaataaagtaaaaaagattggtaaggttaggtacccatctttgaaatgatagccagacaagttagctactagatacaggcccatcttccattgttgcaacttctccatgttatggttgaacttgaacctttcctcatgcttagccaatgcttctccataactacctttccagcgtcgaacatctgaagcctgtaggatccatgttatgaaaaaccggcaaaactaacagtccttttttcctattggcacagtcaaggattggttgcaagttcatctaagcaaaatgaggaagaagcatagtttatagagagcacaatgatggtaatcttggactcttgaattgcgttcacaagtgttggtgttatctcctctcctctcttaagcttctcatgatcaatgtaagtgtggattcccctgtcactaagagctttgtagagattaccaaaaaaccaaggcaggtgtctgagcctctaaagctgaggaacacatcgtaggtgaatgcatctgaacttgatcgcaaagccatgagaactgagaagaaaggctactatatatgattatggatgaagcttcatatatatatatatatatatatatatatatatatatatatatatatattgtttctggccctgcataaataaaataatgcaattaagtttgatcatgcaaataataataattataaaatgttttgctcaatctctcaaatgaaatgcgtgtttgatttaaagttggataattaattctgaatctaaaattgattttgaatatattttagttgtttgatttcactttggagaaaaattataattaattctgagttgaaataattttaggtaattttttattagatccaaaattttatactaaattttattcataacttattttataataaaatattcaaaaataaatcatataatttcaaaatcaaatttaataaaaaccaattttataaaatcaattttatttaaaattaattttatgaatattgatccaaacacatgatgaaatgtattccacgttttggattcactggcaattttgtaagattaatatactaacagtggaaatggcaacagcttattcttcagtttaatttaatactatatataaaataaaacaccctcannnnnnnnnnnnnnnnnnnnnnnnnnnnnnnnnnnnnnnnnnnnnnnnnnnnnnnnnnnnnnnnnnnnnnnnnnnnnnnnnnnnnnnnnnnnnnnnnnnnnnnnnnnnnnnnnnnnnnnnnnnnnnnnnnnnnnnnnnnnnnnnnnnnnnnnnnnnnnnnnnnnnnnnnnnnnnnnnnnnnnnnnnnnnnnnnnnnnnnnnnnnnnnnnnnnnnnnnnnnnnnnnnnnnnnnnnnnnnnnnnnnnnnnnnnnnnnnnnnnnnnnnnnnnnnnnnnnnnnnnnnnnnnnnnnnnnnnnnnnnnnnnnnnnnnnnnnnnnnnnnnnnnnnnnnnnnnnnnnnnnnnnnnnnnnnnnnnnnnnnnnnnnnnnnnnnnnnnnnnnnnnnntttacctacatttggaaaccttccacagtataaagaaagatttcttaatgttggtaaatattgaaatcttccatggagattaattataaaaaaatctattttatattagtttttcttctaacatgtattgcaaattacatattattttgacaactgcattccatcacaagagaataacttcttattattctataaacgtttgaacttgtaatcttgagcaaactattcaatcatcccagcattttgatacgagagtaaaaaaagcaaatttaaaattatacataaataattaacatttaatgttatgtgaacacataataaattaagtgatttttttaaaagaactcacataactttgtatgttttaatcataacaattaattcataacaagatgtaacagttaatattctttcctcttagactcacataaagaagatcctctcactatatacatccttatataggagcatatttagtgacaagatttttttttataccagtgagaagaatagatattgaattattgattattgaccattaaagtatatcataaatggtcaagaataaaacaactaagtgatgatcacttgacatatagacactaagaataattaaggaggtgtagttcaattggttgagtaagaatacgtgagttgttataaatcctgtgatacaagaatataataaatgcatttgcacggcagattcttgttaatgcaggtggtgctctagagtcaacagtttatgcattcaactattaatggagtgttcatctgttctttacaaggaatgggtttcacctgaacaggccctgcctgaagatcttattaagagttaaacctgtgatcaaaaagaagttggaggcttctcctgacattgtcaatattttttcaaacctaatgaaagttcttttttcaagctcaaattaaaaaagactgagctaccatagaagccattgtctggtattctcaactacgtccatgaaagaaaattagtgaccacaaaatgtcaacaaaagaaatttaactcatcctttacagttccaacataaaaatataaataaaaataaaaatctaggaattccatccaaggctagaaattaaaatgccttttacattaaagaatcaactaaaaggataaaaatttaaggcagtacggaataagtataaacatggatactgaatagaccgaagctgcttaacatggatatatttcacattctgataacttacaatagctgctcctccttcagggagtgcttataatacatatgtctacaaaggtggtataaatcattcaacacagtgcaagctaaatgtcctctttaaaatattatataacccacaagtgactaatatgatcactttgccgaaacaagatttaaaaaagaaaatataaagaataagaatatcatccaaaagtgaaccttgtttgtgctttgcttttgaagctcctcccacactaggcaccatgctaaaggccttgcgtttctatagcatagagaacagccatgcaaatgagacagtcgcttcattgagtatatatgcttcatatttaaacctactagttactttaattctttgatgcaaaaagaggaatttgaaagctttcttctcttcatttccggctctcccaaatgcaacgaaacaaaattatcttcatcagggccattcctaagttcagctagacttttcagttccatgtcttctttcaggtagctttgacgtgcaggtgacttgcccgcatagcttggtatgaactggtgttctacatttggagctatttcaatctcactttttatatgaaactcacagggccttattgatgggttgactctttgagagggttcatcttcaacttgagcaagtgggatattcaagcaaaaaggctcaaggctctcttcaagctcaagcttttctttaattggcacagtaggagaggattctccaactgtagaatcaattccagcagcagatccattcctttgctctagcaccacagctacaaaaatgacaaggaaaggagaagtcagctgtaaatgttcaacaaataaataactcaaaagctaggatattgtcactcatgctccagctccatttctaaaaacggttcgacaaaatggatccatgccataaaacctctatatgatatggcatccaccagagcgaaagtagcaaacttgcgtatttcaccacatcatttcaatgacagggcttgagattttaaggggcttaagggtcattcggccatatggatgaaaattatacagcctatatggatgaaaataatattctttttgagtattgtaatgtggagactactagttgtctgggggtcttctcagtcttgactcttaactcttaaggctcaccaaactgtggccaaatgaccagcaggagacaatgggtgcacacaaaatgcgacttgccacaactttgggaaggaagtcctcaagcagttccaaccttgatccaagattcattgatagcaatttgggatgaggaatttgaatcttgggtgcacgaaaacataagagtgaaatttcttgagtgcaagaaaacagaaaagatgaaggtttgaggagcaaagaaccagcagcttggatgttaacaatgtgcaattttccaggcagacgaaacatagaagtctcacccaaaagcagtgatgagaattgacaaaacacactccctgtgttacataatagcccctatttttgtggatgcacaactcaagcatcgcacaaaagattgtctcacagatagaagatgaagttagttgataggttgctaacagtaaaagttgttagcttgatagttgtagtgcctaacagaatagttggatacttagatctaggatgatgtataaatagcattgcgcaagtctatactgggtattcagaaatacaatcaacaattccctcaatacccacctgatcctacactgtggagacagctgctctcgaattcctgagctacatcagtgaagtactagtttccaaattctgttattaagatagtttaattggtctaaaataaaagtttgcagtgttctatgtttctgtttatggtttgctacctgtaataagcaaaggctggaggggaggtgttagacgatatatcattagctattgcttagtagtagtgtgattggggcttgtactagaaatgctactgcttgacctaattaatactaataatataaataggtagcattaggctattgtatcttaacatcttactatcaaactcaaaatacattgctagccttttctcttcttcctttcccttatctaaaccctaaagtttaaaaaattgtgaaacaataaaacactgaatactgcagccttttaatactgctattaattgagagaattgaatatttgaattattaataactgaatgtttgcaaaccttggagtgcttcattcgttgtaatgagatcaagttcaaggagatcaagaagtcggccaagatcaactccacttgtccaattttctgggggttgaccaacttttagtttcaaacgaccccgattagctgtcccaccccagataatgccaacagggcgtggcttctccccattttgtccagtcaagagaatgagacttccactgtcaccttcaaggtcaaatgtctgctgattctcaccaacaacaagaaaatcagtaagaaaacaaatccccttctcatcattgtactctagggcatatgccattatagtccctgtagtcaaaccagaacttcttccgactttaaccacttgtcttccaatgagactgttgattggagactgcaagtctatgatgtttacatcaccaatctcccctacaccttttacagttgtgattacattgttcatattgaaatcttctgcaaatggaatgaatgccccatcagctcgcacaaatgtttctgcaagataataaaattgtaatgtgcatgtgtcatgggtcaggacccaacagaaaattctaagccaaaatcataacctacaaatttgaaataagaaaaccatgaatttggcatgccattttggaaagattctcaaacatagtcttttatctcattataagaacttagatcactactaaagtgcaacatctcctagtatcagaggagcgttaaagaaataaatttagcatatgatgttgggatgaaaccaaaattcactatagggtacattatcaaacataagctagacaatagactggtgtagttattgctgtagaggaaaacaatagattatttagcacaaactttttcacatcaagagctaaacaatacaaatacaatatctcactgaaataattagcagaaaaactccattatatttgccttctgctgcagaaggtttcacttttcaagataattctctaaacaaagatctttaactcaactgtaaaaccaacattgttaaaaccctggcctagcctctgggttccaaattgtgaagactggagtgaccattcccttggggaactctctatattagagtatacttactacgtcaagtgtttttactttgtgtattttgttttctattatctgtgagctgtcagttaactcatagtttgttatagctctaaccagagttagtttgtagcaaatagggctagtttacggttagacttcaagtctctctctctctatatatatagagatgactatatgctttgtaacttgcctctttcattttctgatcaatgagaaatcagagcttcccagactctactacactaagatgcagcctccacggtcaggtacttctacttttgtatttcttataaaatcaaaacattttctaaagaaacatcactttatggaaagaaacttcacttgattaacttgtcgaaactaccaacacaacacctattattttgcattaaaggcaagttagaccccagatttaagattaacaaatagctcttgactgagaacttctagttgttgactgagaactagaaccacattacctgggtttgttcctgcaaaaattccataccaaagatcatcagtaataaatgatgttgctctctcaactgcaccaaggtacacaccgggtccaaggctgggtggtaatgggtgaaacatcttctggtttggatagtctaaatcaacagctacatgtcgatttgttagaaagccaacttctcgatttcctgatcggcttctgacaatagcacccaaggttccatatgtctcttggctggcaaccttcaaggagaagaaattatgaaggaaagatagattccagcattagatcaaggttccacataatgaggagcagaaatcaatacttggaaaaactaaaaatgaaaacaacaaataagtatctaaacaattctaaaaagtacatgaacaaatgaaaatgagtttcatatactatcacttgttcatctagtaaaagaatgaagctgtctatcaacagcatatcataaccatcaatgcccaaaagagacacaattatttctttgaaactatgactcctcaaccattgtagccaccatttcatatgaagaaatgtatttaaagaaatttatttctgcaatggaaaactattatctcagttaattaaaaacaagaaatttgtaacttcattttaggccacttgataatctatagctaaattgataaggtaaaaaatgaaggaaaacttctattttgaatacaaaatgaaatcaccaattcagtaatcggtaatcccatcagtacttttaagatctgttgaaaaagctgccttaattgctgaaagtgacacactgacaccccttagcaagccttagttgcggcctctatgggggttgccagaagtgcaaccttgagggtggtggtttagtcccacattgactagatatgggcatatggccaaattaaaatatataagtggaaggaaatcctcaccttacaagccgagttgtaggtttgagttaggcccataacccacaattctaagaagatcaatttacaagttaccagccacaaacacttatcactgcaacccctatctttcatcattaatgataacatgctccatatctatcataaaccaataacactttctaaagaattttccatcaaagaccaatgaatgggttgaaacgtaaaataatctataatacatatataaacataatttattgccataatttgaaccaagaggaaatgccaatttttttagtgaactggcaattataataagtagtacaccatagaacccaatatattcagaatgtgttggtttcctgccagattacaacacattatcatctaatctatttggaaaggaagaagtgcagatataaaatatataactgcattcaagtccataaaaaataaaaagaaaatgatggccatgatggcaagatggtatatctcttctctagtatcaacttaagaaacactattttcctttcacttacttccatttagtatacagaaaatgtaacacacaagatattgattcttcaaataaagtagaactgtagaagtacctgagagccagagccaacacatgaatcacttccccttaagccatcagcaagctctgtatataattgttctttaggagtttgtgcaggtgcaccataataggagaactccacaacatccacatcacaccaaacacctcctggcccctgtttggaaattaagagatgacttcagatcagcatctttaattagaaattatatgaaatttaagatcttaaataatagtgctatagttccattgttgttttaagatggtacttctagagaaaaatagattttacaataagttaggttaccaccataaagaaaattgtatgtttcctgttaatccataaaataagtgtaattaaattaccaaaagaactaaacagaaaaacaacacattgtagttagatatactatattctatcagcatttgacacctaaaacatgtggaaaaattttacgttaatgcaactcagatttacataaactcagaatagtgtaagttaggggagcaaattgaccaatataaatataagtgaaactgtgagagaagcttactttttcatactagaaatttcttaatcattttctcataagagaccattgtaggccaaagaaaaataaatgataattcactgttcagtgccttatcagcatgtggagaccattctgcttttagcattaataaaacatccattgaggacccaaaaatttctcaataaccagcacctgtttcttatttgctaaatcaattgtgcaaacttttagaaagccagcatttataaaatttcccatatctaacattctatattgtgttttttttctttttgccgtctataaatccaaatcatagtgccaacatacacctataagtcaacatcaacatcaacagcacctttaacccaaattaattggggtcggtggtagatnnnnnnnnnnnnnnnnnnnnnnnnnnnnnnnnnnnnnnnnnnnnnnnnnnnnnnnnnnnnnnnnnnnnnnnnnnnnnnnnnnnnnnnnnnnnnnnnnnnnnnnnnnnnnnnnnnnnnnnnnnnnnnnnnnnnnnnnnnnnnnnnnnnnnnnnnnnnnnnnnnnnnnnnnnnnnnnnnnnnnnnnnnnnnnnnnnnnnnnnnnnnnnnnnnnnnnnnnnnnnnnnnnnnnnnnnnnnnnnnnnnnnnnnnnnnnnnnnnnnnnnnnnnnnnnnnnnnnnnnnnnnnnnnnnnnnnnnnnnnnnnnnnnnnnnnnnnnnnnnnnnnnnnnnnnnnnnnnnnnnnnnnnnnnnnnnnnnnnnnnnnnnnnnnnnnnnnnnnnnnnnnnnnnnnnnnnnnnnnnnnnnnnnnnnnnnnnnnnnnnnnnnnnnnnnnnnnnnnnnnnnnnnnnnnnnnnnnnnnnnnnnnnnnnnnnnnnnnnnnnnnnnnnnnnnnnnnnnnnnnnnnnnnnnnnnnnnnnnnnnnnnnnnnnnnnnnnnnnnnnnnnnnnnnnnnnnnnnnnnnnnnnnnnnnnnnnnnnnnnnnnnnnnnnnnnnnnnnnnnnnnnnnnnnnnnnnnnnnnnnnnnnnnnnnnnnnnnnnnnnnnnnnnnnnnnnnnnnnnnnnnnnnnnnnnnnnnnnnnnnnnnnnnnnnnnnnnnnnnnnnnnnnnnnnnnnnnnnnnnnnnnnnnnnnnnnnnnnnnnnnnnnnnnnnnnnnnnnnnnnnnnnnnnnnnnnnnnnnnnnnnnnnnnnnnnnnnnnnnnnnnnnnnnnnnnnnnnnnnnnnnnnnnnnnnnnnnnnnnnnnnnnnnnnnnnnnnnnnnnnnnnnnnnnnnnnnnnnnnnnnnnnnnnnnnnnnnnnnnnnnnnnnnnnnnnnnnnnnnnnnnnnnnnnnnnnnnnnnnnnnnnnnnnnnnnnnnnnnnnnnnnnnnnnnnnnnnnnnnnnnnnnnnnnnnnnnnnnnnnnnnnnnnnnnnnnnnnnnnnnnnnnnnnnnnnnnnnnnnnnnnnnnnnnnnnnnnnnnnnnnnnnnnnnnnnnnnnnnnnnnnnnnnnnnnnnnnnnnnnnnnnnnnnnnnnnnnnnnnnnnnnnnnnnnnnnnnnnnnnnnnnnnnnnnnnnnnnnnnnnnnnnnnnnnnnnnnnnnnnnnnnnnnnnnnnnnnnnnnnnnnnnnnnnnnnnnnnnnnnnnnnnnnnnnnnnnnnnnnnnnnnnnnnnnnnnnnnnnnnnnnnnnnnnnnnnnnnnnnnnnnnnnnnnnnnnnnnnnnnnnnnnnnnnnnnnnnnnnnnnnnnnnnnnnnnnnnnnnnnnnnnnnnnnnnnnnnnnnnnnnnnnnnnnnnnnnnnnnnnnnnnnnnnnnnnnnnnnnnnnnnnnnnnnnnnnnnnnnnnnnnnnnnnnnnnnnnnnnnnnnnnnnnnnnnnnnnnnnnnnnnnnnnnnnnnnnnnnnnnnnnnnnnnnnnnnnnnnnnnnnnnnnnnnnnnnnnnnnnnnnnnnnnnnnnnnnnnnnnnnnnnnnnnnnnnnnnnnnnnnnnnnnnnnnnnnnnnnnnnnnnnnnnnnnnnnnnnnnnnnnnnnnnnnnnnnnnnnnnnnnnnnnnnnnnnnnnnnnnnnnnnnnnnnnnnnnnnnnnnnnnnnnnnnnnnnnnnnnnnnnnnnnnnnnnnnnnnnnnnnnnnnnnnnnnnnnnnnnnnnnnnnnnnnnnnnnnnnnnnnnnnnnnnnnnnnnnnnnnnnnnnnnnnnnnnnnnnnnnnnnnnnnnnnnnnnnnnnnnnnnnnnnnnnnnnnnnnnnnnnnnnnnnnnnnnnnnnnnnnnnnnnnnnnnnnnnnnnnnnnnnnnnnnnnnnnnnnnnnnnnnnnnnnnnnnnnnnnnnnnnnnnnnnnnnnnnnnnnnnnnnnnnnnnnnnnnnnnnnnnnnnnnnnnnnnnnnnnnnnnnnnnnnnnnnnnnnnnnnnnnnnnnnnnnnnnnnnnnnnnnnnnnnnnnnnnnnnnnnnnnnnnnnnnnnnnnnnnnnnnnnnnnnnnnnnnnnnnnnnnnnnnnnnnnnnnnnnnnnnnnnnnnnnnnnnnnnnnnnnnnnnnnnnnnnnnnnnnnnnnnnnnnnnnnnnnnnnnnnnnnnnnnnnnnnataagatccccgactacaagcttaaccatcataatcctatcgcctttcctttttacatcaacatacacctataagtaaatactaaaaacaaagaaccaaaacagaaacaacaaaaataaataatcaataattcaattgaaaagtgtgaggagatccactaaagccatgtagaaacctgcaacatagccagaagaaccaaaattccccacctcaagggcagcaggtaggcactgaacatggttgagccattgcctgtgaactttacgggcaacgaagacaagaatagctggaatatcagtcaaaacacctcctctaattcgaaatccaattgcagtgccaagactgaatctgcgtaagatcttgctatgaaatgccctaatagtcatcagttcaagcaaggtagtagcttgctgtcctgttggcaatcgacccaaagtttcagggagcacacccttttgaaggttcccaaaatagttagctctatcctccgctgcatcgttccagcgactcaatgtaggccaagaaaaataggcagtgttgctctcagaatgctgagcacctcctgcaaaaggttgcaagtgtgaaggactggaagggttaggatgaccatagtagctcctttcaaggtccagagctgactcctctgattgtgttgatccagaatgatgagctcttaagtccaatcgattctgattcatcggtcaattctcctacatcacactaaacttagcttcaacaagcttaaataattgaagaccgagatccacataaccaaatcaaaacaccatttcctgttatactcaaactcaaactacaaagatttttcaacaaaacttcaacataggtggagaaaattgttcagagagcatctgaacaggaaatggtgttttgatttacagaaaggaaacttcatctgcataaagtaaacctaacaagccaaagactactatttcatgtacataacataaacaacacagactggaatgcccccagtacatctgaacaggaagctccaaaaattttcacaaaataataacaaaatcaacagacaggcaaagtacaaactataggaaataagatcattacacaagttcttcagttgcaaaggccagcacatctccagaaatttatcatatgaaaacataaaatataagctatcaagtattatattggtactcaagattatacatttgcatacaaaatatcaacaccactttggtactaaatcaaaaaataaggattacaatccccttaaagccaaagctatagcaaaccttcaagtgacacatacaaagggaacccatgagaagaaaaacaatagaaaaattaaaagtcatcatgcagtgtacagaagagaatccataatcttaacgtgcaataataacagcttcaaaatccgaaccccgtatcaagccagatgctttttatcagaagagagaaagagaaattgaagcaaagcaaacccagaaagccatttcaagaaataggtaccccaaaatggaacaatgggcaaacagtgtgtgcaaaaacagacctatcttagaaaaagaaaaagagagaaaacacaaagtttctcaactcaggcacaatcagtgtcaaacaaaaaacgcaacccgttcattgaaaagggttgtgaaaaaagataaaattttgcagagccaatcagagaacactcaccgatcagcaatgttggagcaatggaaatggcctcctcggaacaaagaagctcgaaggttttcatgccctagtacatgtaaattctgtgccaatcatctatgagattaagatttcagaagaaagggaatcaaagttcaaaaggggtgcattagaatagtagtattagtgagtatgattcctaagctttgcctcaacctcgttgtgttgttattgttatagttgttgctgtgtagagtgcacgaatgagtattgagaagacagagagagagtagtgatgatgatgatgaaagagcactactagctaatagctatacttgtggattgtcaaaaagcattaatatatctgtatggtatgtagtatctatcatctatatgttaatgacatggcaataatacaataaactaatgtataattaatattaattcttttagcccttttctgctgtttttttttaatttatcatttttaatatattattattagtagcttttttgtttcagctatgggagagatcctattcctgtcacacagcttacaattatgagtgggggaaattttaatggaagagacatgggcacccaggcaacaagggaaaataataatataacatttctttggatacagatgatattatatttatcaatttatttatgtgggtggggtttaggggcctctccctgtttgctccccaaaagttgcacaccctttcaatcttaataattcatttcccatctatctagctataaaattcacacaaaagaaagaaaaaaaaacggacctagctgtggctgcccttacacttttgtccactccacatgcttctttgggtcatgtgatcatgcatttttttttccattacttaattttggtttattgtttctttggttaatttttttctcattttcgtgtaattggagttattataattgaaaacaagtaaaatgataacaaattgattgtccgtatcaaacaactacttttaatgtcccaaagaaggaacaatactacaatactgcaagaatttgtagttgatgacaacattttatacaattttgctcaagctcccattcattttgtgttcttgagaactagtgcatttttattcttgcataatttccatatttagactattcaagcccctataaagtatacattaattgtcataaaaaaaatggttgcacaattatatccattaatcttcaattgtatctactaattttcaagataaaaacatgtattgttcttggataaattttttcataagtatttatgaaagaagaaaataataaaacaaaatgaatttagttttttcatagacttaaatcaatttatgtaccttaattcaatacaagttctttaaaaaaaaggtacataagttaatttttacttatagtgaattttaatatattttatcttttattttatcgtataagtgcttttatccaaataaattaattgtcaacacaacaacacatgtttgatatgtgatcacattattttattttatttttgaaaggctaaaatcaaaataatattattgaaaaagaagcatgagtacaaggtgtacccaaaccaaattacacaagattactatattacaagaatatgtgaccacattattacatacatgtttggttaagaaagcctcaaatgaaatttatttctatatctaaaacataattttggaattttagaggagaagaaaaataattataacgaataaaaacatttgtctagatttttgttttgaactggactcgaggttcaatctaccaaataagacatctcgactcaaagggagaactagtctacttcaataagtattgattgaaatacgccacaatccaaaaacatgaatgctacaatacactttaggcataagggacgtaccttgacctagaataaagtcatagtgttctactccaaactagactaacattgctccttagaggccttagtgacaatttatggtctaaatttgttttattaaagccttacataatgaatgtatgtgctaagttactaagtcgaccttagatgacaaacatttggtcaaattcattttattaaagccatagtgacaaatgtatctaataagttattaatttggtcttacatgatgatatatggtcctaaatcatttattaaagtcttaagtgacaaacatcagtgaaaaaaatattaaattagtgtatgcaataggcatctatatttgaaatcatctcattcttgaaaggtcggccttgtatgattcgaattcgttattctttaacctttcatgagtgaagattatgctatgttatggtgaaagaccacagcaaaaagtgaatttgactttgagtatccatttgttcaaggtttgtttagagttacaagttaacttagcattgatttatcaaaataacatagtgttggtaacttagttaattcataagtcaagtccaagaaaataactcacaatttcattcaaagtacaaaattgcatggaaaaggaaaaacatatcacaaagaaagttaatacattagtgagaaaaggtaaaaaggaaaaggctttaaacaaaatttggtgtagagaatgagttgtttgagttgatcctttcaactctaccttctttgacacataaaaaagcatttgaagtaatattaacatcgaaataaaagcttataatcgttagttgggcgacaacattgttgaaggactcaacaacaatgtcaaactaatccctcataatctagggcttgtttgggtaaatttttctagaaacatttctaggaaaagaaaaaagaagatgaaaatgaaatgaacttgttcattaactctcaattattacaaccattttgatttggttggttgcaataactccatgttagacaaaaaattatcaagttgtagaaaatgttataataaaactttgaccttgaactttctcaatagatcaggactgttataattaaactttggtttacagtgcaaagacactaagaagaccttcacaaatattttcctatacatatttttattgccttcctccagctttttctacacaaccatggcaaaaaaaataaaataaaatatggacaaagataaatggaatggagaataaaaaaaaggaaacaaaacaccaaaaaaaataagaaaacgatgatgaagatgacagttaaaaattgtaaaggaattgaaggaaatcaaaagtttgaaaaaggaaaaaaaaacacaggtgaaatatttttatctataagcattttttatagtggtaaaactgactcttccacttcaaaactaagggtaaaaaatatataaaattttaaccaaaactctaaattttcatgataactacatgaaaccttgtgacatttgtcatagttattatgaggctaaaaaatgacattatataaaaaaatttcagatgtcccattaaatggtatattacaacccaaacaaagatgaattgatatgtctaagactttgccttcaaataagcaaaaaccacaaaatctatgcaaaaaattgacattctcacataagtagcacgtcaaaccttgggaaacagttataaaccaagctcaatgctcaattagcccaacaaggaaccttgacctaaagagagaactagtccaattcatcaaatattgaccaaagtgaatgtcactacccattaacatgaatgctaaaatacatttaggcacatgaaagtgtatcttgacctaaagtaaagttatgatgttctactccaaaaatagactaacattgcttcttgaaggccttatctccaagaaatccagcccatcttagacccctataaatacaaccaacatcaataatagtgtcaagtatgcatttattacacattatcactctagtaaaagtattattgacttgagtgttggaatgttttttacaggtacttaacccttgccccattatatcccaatcccattagacatgagagtcgtcatttctacaacttttgaacaataataaaggaagaacgaacataagttaaagtcaagttagaattcgatcaaagtcaaccttaccaccttggacacaacaattttcatccattgtacttacttttgggatgaaattcgctcttcataggtaggttttattctacgagacaagcaaataatgtaggatgcgtgtttgtactcatgcctacaatgtatgcaaaatcactaaagatgaaacaaatattataaaaatactctttataacttctattttatcattcaattagaaccaaacatgcactattattatctgtataaatgaacaatacaaatatgtcatggaacgtccaaaaaggacaaactagtaaataaacatgaattatcggaattttttttggattttaaagtataaaatcatttgtttcaagtatgatttttgaaatggtaacatggaagaaaagatgaaatagcatgtcctcctgccagaacaactggtatttgtagaaaaccttttgtgacacataaatagaatttgattgagacatgcaaagtaaaattacttgctagtttatgctacaattgcttggatgttttaggaaattacacccaatttgattggaaaaaaatgatatttagttgttgaaataagtaacttgatttgtataatttcaaaatgagtcaggtttgattaaacatgtaacttgatccgataaaaatttcactggttgaatttgtataatttcattgtcaaaccctatacaaatgaacccattcttacacaaattgagttaatatgatatgaacatttaaatatatattttattttgtaaaaattagaaatttttagaataataatttattttttcttagagctttgcaaatatataatgacaaaatactttataaagagattaaattgtgataatattttattaattatcaataaaatgaatggtttcaatgttaatatatattttattttagataaaaataaactattatattaacttaagaaaaacataaacaaaataagacaaaaaataaaaacaaaaaaaagaggaaaaaatcatggttaaaaattagcaaaaaattgtggtattttgtatttaataatttatatataatgaaaaaaaaagaactacatggcacgcgttgggtcagaggtttaaaacacataatctgatacctatactaattatactgatttggattggatcggatttgactcaaacttttaaaaaatctataattgaattagttttgatagactaggatttgcgggctactactcctaattgaaataaacaattataacaatttataattatggtttattaaatttagatactatataaaattaaaaattaaaaaacatctttgaaattttaattaagtattaaaaattgttttacggctataaacaacttccaaaaaaaaacatatttgaaactttctaatttcagaaatttcaaaatttaaattaattaataaaaattatctcaattatgaatatctcattatttaatatcaattaaaaagatttgaaaatgattattttttaaataatttaaaagagtgattattttaaaaaaatatttttatttgatataaaaaatgaacatgttctatataataaagtaattaaaaaatatttttatttgatataaaaaatgaacatgttctatataataaaataaacacaaaaacacatgactttaaatgggtgtgaccctaattgaattgatacgagatgtttaaaactttgatagagttttgacgtattgttgtagtggtctgtctttccttctgccacaacaacgtagattgatggtgaaggttgggtacgtacggtacatataaaaacacttcaatagtttaatgcctaattcaataatttttttaataaatataataaatgtatacttgacattctgataatggtctatttataagaatattttgaaatggattgaggtgaattatgcaggactcaaaatccctactagaaaggttttacctgtacaaaagaaaatatactatcaatctgctcctagttaatatgtgcttccatattctaaattgtattgaatttgcttctttttaaaataaaataaaaattgtattgaattcattttgtaattgaatcttgtcatggacttaatttgatccatttactatgagagacctataaaacggtacctatatattataagtttaataattatgcactcttaatataaaaaaaaaaatatgatgccttaaaaaaacataaagaatatgatgttatcataaatgataattaataattgaatgcatataaaattattttacattatcaacatattaaatattaattcatatattatctaccaaggtggaataactttaatagattgtacttgtgtttgtctaatccaaaccacaaaccctcttagaagttcaataatttaatttaattttatgaaatatttctaagcatccaaaagaaattgaactgtacacaaagaaacattaggacagaaactgctttcgattatattagccaatcaaggaacctgtatatgagggttgaggaacaactccaaatctctaatattcatgctctcaagcctcaatgtcatttaatttagttttaagaaatgaagcaaaatcctacattaagcaacattataaaattgtcaaaaattgaaaatatacgataacacacggtcacaaattaaagcttacgcaatagtacaagcttgagatcttgcaataatttttttctccaaaaacaaacaacaaccatttgtctctatctcgctttctctttctcccagtccaatcacccattatccttacattatcttcactattattagtcacatcacggttttcaattttcaatcatcaaatcatgatatctttcaactcatattaaaattattaacacagagactaaaaagggtcttattatatttatacacacaccaatataatcacctctagactctactatattggtgcgtttgcattatcattttatatcaagaaaccaaggccaaataacacatagaagatgtgtctagagagtgtgagtgaggcatttagacaaagaagagtgtctaatataataaaagacactgatctttcggttagatccgtgaactttactagctaggggaccaagacaaagatggaataaaacccttgtgccagcaaaataagatattctaggatatgcctttaatttttagcatttgccatgtatatttcaaggcttctacatgtttatgcacttgtctttatcaacctcgatattatttaaaacagattttgtcaatgaaaaaggagaaaaaataataaatgtaattttcttccctcctacttgctgaaagaaaaacttcaagaaagcaataattggagaaggggtaccccatgtaggtggggcccaccacaaattaagtctcttacgcatgctaatatggtcagcgcactctcgtccaacggcccaagaatgcactatcgaaagggcaatgcaatgctactacccaatcctttctttttctcattagaaaaatgttacatgagtgttatattataattagtttaatgtctattatttatttgttgaatgtgtaaaataattttatattatatttaattatagattatttttgaattattttaaaatatttattttaaaattaatgaatttatcatatattatgagttgtgattgaatgattgtgtaaaacatttttatagcttttttcttatatcatttaacaataaaaaaatattaatatgataaaatttatgatatgataaaaaagagataaagaaaaataagagatgttaaatgattaattaaaatgtgggatatttatttatatatcattattctctttcggatatattgcagtgtttggtgagaatagaaaaatcagaatttgtttttatttttcgtaggccacattccttgcttgccccatccccttttatctattgataattgataataaattaaaaggaaattagagaaagtaatatttatcactctgaaatttgattagtttgtacataggcaccataaactttgcaatcttctaggacttctcaaggatatttggagggccttttaataatgattaaaatacattttttagaaaaaagtatttaaacatattttttatgatatcaaatcaactattaaatctatatgattaagttaagttattttctagtcaagtgttattttttatcttaaatttttaattgaaacttatttagatataatatgatttttttaaaattcatagtatatttttgtaaaaatatttttaatacagtaccaaattttaaaataataatacacacgttgctaattttgctgtgactccacgaaagtgcatttaatctagacacaggtctagtcacttgcgtctaaagccgaatctaatcattttatgtcgtttttaaattaccgttccttaaattattgatatatatatatatatataatacgaattttatgagaatttcttacgtgaaattatgataacaattaatagcaacaattaaattattattagaaataataaattgttgaaattaaaatatttaaaatttaaattcaaatataatataatcattaaatctaaaagaaattcatcagacaaattatatcctaaaatatcttaattattgttaatttatcattatcactataactgtcatcactcatgatagcataggtgatgacggcgatagtggtaacaatgacgacggtcatgacaatataggtggtaattgatgacagtgagggtgacagctgtgacaatcatggtaggaactacaacggtatttatggtgatgacaacggtaatgacaaaggtcatgataaaataggttatgacgattgacaacaatgataatgacaattgttgatggtggtgacaattgatgatggtggtgataacaacgacaattataataatgactacaatgatactcatgatgataacaatatcaatcatgataatgagatgaatgttctaatatttaatttttttctcttgtttaaatgtaaaattttataacatgtgactaataacatcttttctctatatctctttccattgtatcaaccatttcatctctctcttttctcttcttttgttatctccctactatttgtaaaaaaaattgtttaattttatagcacatatataatatctcgtatgactgctattaataatgattttaaaaaaaatcaataataaaacattttatttgataatataaaattattttgggatgaatctcctaaaagttttcataacttcccagattccgtactttctcttacttttatgttttctcattttctattagaccctaacaatgaggtcctacacgagatccaacatgctaactggtggaactcaaagcccaataccaaatatatgtaatctttcttatctatttaaaacaatatacttcctctcttcttatttatataaataaaacttaattacctaattcatcaaaattaaaaaataattaatttaattaataattataaatttattttaaattaataacttcttttaaaactatcattattattaatattttttctcttttctaatggtttattaatatatcttctctcttcttttaatatagagtatttctagtttacaaataatttatgcaaggaacatatagattatgttttataaaaaaaaacaaagaactatttcagggtcttataaataagaaacaaaagaatactataatatgtattgtaggatatgtccaggtacaattaattcaaccagttttaacaaaggaatcaatgaagctaatccaaaaaatatattccaacattaaaagtatagacagtagacagaaacacacacctatcccagtttattttgaaaatatgtttttcaataaagcactattgtttctgcagttattcaacaaaacaattcacttagaagatacagaaaattcctcataaatctcttacaattatacaaacttgctataaaccacctatgcagaaaacctttctctgtcatgaggagcagaataatcaatatttggccctacaggaacgatcccaaatggattgatagaaggatgacttccatagtaatgcaactttatatgttccaggttcactgtgctactaatgccaggaatttggaaaatgtctttattaattatcctatattaactaagtttgttaggataactaaatttgttagagcagattaattttctgttatggttattatcataagtttgttagagtagattatccttatatcataatgactgcagctactgctatcataagtttgttagagtagattatctttctgttatatcataataactgcagcttctgctatgataattataaatactgcagcatgcttgtattcaacgtgagtgaataaacagattcattcattagccttttctttatgttcatgacctcagttcaattgtttaatagtctttagtgtaattgaaaacattcgggtattcgcgtagcagcttcttgtttcacttgaagtgaacagcataaacctacaattatagcaaagatcaattactcaacagtcacaacattgaaatggatatattgcaaaatgagtcccaaaataggaaagctaaagagtacatgacatcagaaggcaaattaaaaataagaccaccaatcatgcaatgagagaattgccctaatagtttattccttcctccaacaccatcaaaatgttgagagtacaaaagcaatgacaaggagaaggaaaaactttgtgaaggtaatgatttatcattgtggcatcttgaagtttaaaatgagaataaaatagaaatttgagaagtttacatatttgcaccagccaaagccaaataaaacaatgaatgagatgatttattttttaaatttattttcactggtctcattaagagtaaaatactacaccaaaaacataacaaggaaagctgactattctgaactatggaaaatattagagattttcatttgttagaacttagaagcacaacttcgtaaaattccaagcccactatttgttagatgtcttaggaaatactttgttggttattagaaatctgttggatatgacttgtgattagaaagttatttcccttttttctgacatgtttcaactctataaaaagggagcaatgcagagaattaacataattcttctgattcaaaatttatttattttctctgttttagttagtgttgtaccaacaaattggcatcaaagctctcttctaaagggtcctgcgagttgaaaaaaaaaaaaaaagaagactcaccctacatagcactagcctcaccggttcttgacggtgacaactatcgtatttgggcagccagagcctataatagagacacacctagaggcaaatgatctctgggaagctgtagaggagaactacgatgttcttcctttaccggataatccaacactggctcagattagaaaccggaaggaaagaaaagctagaaattcaaaggcaaaagcttctttgttttctgccgtcacaagaaaattcactagagatcagcattgggaatttggcacttcctcaaggatgaatatgaaggaaaaaaaaagatatagagcctggaagtgttgaatctggttacaggatttgagatacaaaaaatgaagaagtcaaacaatcaagattcacgagtatgccaataaacttctcaacattgcaaataagattgcatggctttgaattttctgattctaaaatggttaagaaaatacttattactgttcttgagagatttcaagccacaatccattctttagaaaatactaaagatctgtctaatattaccttaatataactattaaatgcattaaaaaggagaatggtgagaaatgaacaatctaaagagagtgctctccaagctcagataaaaggttcaggaggaagaacaacaatgagaagaagagtgacaaggctgacaacaacaacaaaaatagggattgtatttgtccatcatgtccatactacaaaaagaggaatcacccacaaagaaagtgttggttgaggcctaatgtcgagtgcatggtaagctttggatgcatagagcatgtaatagctctagtgattcatgactgatttacagtggctgcacaaaccacatgaccaaaagttatttaaagagcttgataaaactatcatttccaaagtcaaaattggacatggtgaatttattcaaatcaaggtcaaagtaaatcaggctgtagaaagcttaacaagtttgaaatatatttctgatgctttataagtgcttgacattgaccaaaacctgcttagtgttggaaagttgattgaaaaaggtttcacggtcatatttgaaaacatggtaatggtgcttaattaaagatgtaaatggtagagatatattcaaagtgcaaatgagggcaaaaagctttgccctaattctaatggaggaagaacaaagagcattctaagcactgtaagcaatgcagaattatggcacaaaaggctagggcatttccatcatgttgggatttttatatgcagaaacataatttggtgaaaggtgtgtcgttgctcaaagacaagctagctgattgcatgacttgtcaataaggcaaacaagttaaatttgtatatatttaaaccaagtctctaccaaaagctaaatttacagccttaagaaacaagttaggcttctgctactactaaggcaagaagaaaagtgttggtaacatgcgtcagagttgctacgaaaagattactgcataattggttgttggatcaaatctttaggaaatattttatttttttattagttgatattaggaatctgttagatatcttgaggaaatactttatttgttattagaaatctgtcagacatgccttgcaattggcaagatattttcttttttcctgacatgtttcagctttattaaaagcgatcattgcggtgaataaacataattccattattcaatttcttttctctactttgtttctctgtttttaagatattcccaaatgtcaacaataaatgccctataataaacacactcacacacactttatctcatagagtgacaaacaaacgaacgtctgcttcagtgagtgtattgccacatatatagcgttgcttgcttagtatatcctcacatttgtccaaagccccatataattgtcttgcagcctggaaaaaggaagggccaagtaaacagttgcaatcatctgagtacagcagttttttaacaaatgtaacatttaagtaccaactgttgctagaaagggttaaaaatagctactaacctcattgtatggttcttgcttcttcgcaaacccacatttataaacaccattatttatactatcatatatccaatcgttggtatcatcaatttgggcttttaaatcagtgggagacaagtccaaggtggggttttctgcaatattattgaattcagtattaaacatgcggattatctctgagctctcgttgttaacaattgtcttgagtttcttatcccacagaacctgtgcagatcaaaagccatcagttgacaataaatatcttcccagcaaagcaaatataaagaaacaagaaataagacagtgtatcttcatacaggaacattgtactttccggcatagttttcacttgcaatttcataaagttccctaatagtctttgctccattgaacctatcaggttcagccgcaggcacctcggtttccgattcaggaaaaatccaccccttatattcatctgattctctagttctctcaaagatgggtttgacagcttgatcattaaacacgcgggatatgaaattgcgcgatgaactaagcaactattctacttgaaaaatattcagcatgaaggctactaactaaccgagaaactgatggctttgtcaagtcctttgatattcaagtaagcaaggcacctggaagcccaaggacaagcatatgatacatagagatgatacctccctgattccggtggaaactgcgaatttgggtccctcgaaatccaatttctgaatgttgaagcagatcttccaaaggcaccagtgtctgatatctcatccaatgaaaatcgagccattccaactatatgctaagcagaatatattttacaaagcaatcacagacagcaccaaatcttcaaaaagtaaagaatggagcaaaacaatacttagttcaacatgaaattggctttagttcatgtatcatgctacatacacatacttaatggattcagaattcacaagataagcatataccatggtaacaattatcatctattgtgcaatgtataaatttcctaaatcgtatgtaagaaaattcttgtctcgacaaaataaagaacatgaacaaaaagtagatacttttcatgaaaactaacaattttaacatgcagattcccatcaagcctattgcatacctaaaagcaagagaggaaaagagaggtttgttgatgaaacataccttgtactggtagtaattgtagcaaaagtcagacagaggaaaagtgcttttggggcgtaacaatggtagtctcagacacaacattatttcagtgaattcatttattaggaagtggaaatgatggacaatcattaaaattaaatgatagacgaaaagattattagatatggtaagttttataatcattgttttaaaagtgatttgagcgaaaactagatttgatgtgcaaggtgtcaggtttgaagcttggcaattgaaaatataatgtgattgttaaaaaagatctattaatgattaaataagttttcggctaagattacttaaataagttgatgatatttagatgataaaaaaaatgatgatttgaaattaaataagttcatgttctaattaaaatttgtaaatttaagtttgtaaaagtattcaaatagttgattattagaaattaagttttaggttaaattttagtctcatacatatttttgtcaattaatcaaatataattttaaatttattatttttacaaacatatttttgaatatttgaagatggatcttgtcacaatgataaaattatgccttggtgatttattggtgatagatttaaattcggaaacagtttctttgcatatacaagtataagttacatataatattcctcctttttacctccgttcttcttaataatgggtacctgattaatatttttgaatcttttccacccaaaaatccaaagaccctaaatctcactaatcattgttagtccgtgannnnnnnnnnnnnnnnnnnnnnnnnnnnnnnnnnnnnnnnnnnnnnnnnnnnnnnnnnnnnnnnnnnnnnnnnnnnnnnnnnntttagtccctaaaatatataaattgttatattaaagccaataaaattttaaaaaatcaaataagtatctgaaagtgtaatttcaaatttctctattaataatttaattgcattttttaattttaaaactgatgtaacaacattatacaaaattaaaatggaggttcattgtttagttgagagtatttataccaatgcctattaatttcaatcactaattagttgaaataatttatcagaaaaacagttattttgactttatatttattttaagacggcataaactgtaaaagtatccccaagcaatgtttaagttgatttttatttaactaaaatgtaattttcatctccctactttcttaaatttgtgtttttaatttcctcattttaaaattgtgacatttcattcttcatttttaaaagttcaccattttattcctcaattttttaattgaaatattttatctcctacttttacaaaatttacaattttagtttttttagtcaatttcaaatgttaatatatgttatttgtaaacgttaacggacaagtatttgtttattataaatatgtcaaatattttttaaattatttaattattaacaaatttaatttattaaaaagtatacaattaacaagtctaaaattgactaagaagtaattacatagtttttataaattaagaacaaaatatttcaattaaaaaacaagaatactaaaattacatatttttaaaaataaaaaagaaaatatctcaataaaaaaataaaagactaaaattataaatctaaaaaaatagaaggataaaaattatattttaacattttttctttaactttaactttggtccaaggcaaccttgaaggccggacataacaacaatattgtacagtttaatcaatgggctacgactttgcgccactcttttttcttaatcgtaatatcttttttacatcatttctataaaattgatttttaagacatatttaatatttatggaaatttaatattaaaaagtactattcttttcaatattttaaatctaaaatataataagcaatatttttaatttttaattttaaaagaatgtttaatacaattaaaagctatatttgtagaactgatatagaagaaagaatgctacagcctacagctagggggaaaaaagtagtgaaaagtcatttccttgcacggctgattttcgaagaaaagcccactatactgtgcttactgaacggcccaaatttataagggagttgctattcttacttcgtttttactatttgcacccctagcttaattatattataaccaaaatcacccttttggcctaaacacaattctgttgtttattgatcaaaacggaaacacgttcccattacaaatgaggggtgtgcgtcataaatatgcaatggaaatttgatattgttgtatattaatggaaatggattttagtttatgcataagttaaaaaataagagaaactatgtgaaagggtttttataaattaacttatgtattagttaattttagtttaaagaaaaatattttattttattttcttctcttagcattgtttttttttttcataattattatccaatttatgattcttcaagtgtcctcttaagttgttggaaaaaaaacaaaaacacaataaagcacaatttcccccccgataaatctcgatattaatctcaagattgtttatttcatactttaagagtcaatatctcttctactagggggaggcttatattatagtatgttttataagggataaagaggataaggaaatggaaagggacaaagtgcattgctggatcaaatttatgcacttaatatcctataacataaccaaacattttgacctaagaggatagagaagtgaaaattttagaactggctcggtttcaattttaaatcttcttgatttttttaattattctatactttaccaactttnnnnnnnnnngttgtatattaatggaaatggattttagtttatgcataagttaaaaaataagagaaactatgtgaaagggtttttataaattaacttatgtattagttaattttagtttaaagaaaaatattttattttattttcttctcttagcattgtttttttttttcataattattatccaatttatgattcttcaagtgtcctcttaagttgttggaaaaaaaacaaaaacacaataaagcacaatttcccccccgataaatctcgatattaatctcaagattgtttatttcatactttaagagtcaatatctcttnnnnnnnnnnctggctcggtttcaattttaaatcttcttgatttttttaattattctatactttaccaactttgtaattaggttgttaagcttttacttgattaactctataaaaaaactctcacaaatcaactgttatatttaacacactctataaacactggtccattatctacacacctctagtcatgtgtttgtgattaattttatttccgaccattacaaatagacgggaggatccaattcaaaaaaagtctaggaatcaattattaaaaaaannnnnnnnnncaaaggtactatcttaattttagttctttgcttattcttaaatatttatatagaaagtaaatatttttacagaaggttttcttttttcttttgtctccattgatcatttcttacataaaattgtaaaaataaagtaaaataagtaagagattactatttaaaaatttttgaaaataaaaaaataaaaccaaaacacgttctattagaccagacatatccttaatactcaagagcactatcaatctcgtattaaaaagaaggtaggatttttttctttcttacttgagtgaagaaggtaggaaaatcctaaaaaatatttgtcaaaactgacgtgtgtgtgtgtgtgttagcatataaacaaaccatatatatatatatatatatgtgtgtgtgtgtgtgtgtgtgtgtggttagcatgtaaacaaaccataataatccagcttctaggttctttctcattggaagacttctgaaagtcaagttcagcgtgagagactaacatccttttcttaaaaacgtgttttctagaagaagtttttgcatagtgtgagattcttaggtgtctataatcctgattaattatgacgtgatatatagttgaattattttttaactaattttggtaaattaaaaaattcatatacatgccaagtaaaaattgatcaagattatagacatgtgatgctctaagatcatatagtaatttttggttcttctctcgcctcatttcaaaattggaactcaaagtgtggttttgtttccaaattgtaatgctagttgaccttgacccaatgcagctcttctttaatttccactgctaactagtatgttattatatatgtattttatttatcaaactcatattttcttttaacatacactatgtcgttgcaaaagtcatgcacagatcacaacgacaagaagttaatttttgtttaccaaattgacttgcatattggcagatataggcaacccacacaacaaattacatagttactacaaactcatcttaattgttcatacaatagatagttacagtatgcttggtggtggtagcagaagcagcacaagactaattggacaatcatcatgttcatgtccaccaagaatggttaaaatttcatctgcgtcttcttcttcctcttttgcatcacctcttaaaatatacgatgtttttatcagttttagaggcgaggacacacgcaatagcttcataagccatctttatgctgcctttcagctcaacaaaatccaagccttcatagacaacaggcttcacaagggggatgagatctctccctcgattttcaaagccatcaaacactccaacctttctgtggttgttctctctaaacactatgcttcctccacgtggtgcttgcgtgaactcgcagaaatacttgatcacaagaaacgtggtggacacattgttgtacctgtgttctataagatcgacccttctcatgttaggaagcagaccggcacttatgggaaagcgttcgaaaaatatgaaagagatgttaaacacaacatggccatgctgcacaaatggaaagctgctctcactgaagttgccaatttagttgggtgggaattaaagaatcataggtataatcttttttacttttggaaatccccctcctgttttcttacttgaaagatgaatgattaggtttatatattgagagtctacttactatgatactaagagaaatctaaggatttcagtacagttgttttctaggccaataattgaatgagtttaggcaaactgagaaagaaagagtttttcaatatttgtaccagaagttttcgaaggtaccatagaattgttcatatcatatatataggccaaatcaacatcatgtgcaggtgggttacatttctcatatcttacatagtcaacatcacgagaagatgtgttagattcctttgcttctaatactgtaaatcactagtctatttatttcaaggtaattatgtgatcagatcttacttgtgaagttgtgatgcatatttcaccttaatattctttttatgcatgttaggacggaatatgaactcattgagggaattgtcaaagatgttatgcaaaagctgaatcgtatatttcccactgaagtaaaagaaacacttgttggaattgatcaaaatattgctcctatagaatcattattgagaatcaggtcaaaagaagttcgcataattggacttgagattggagaattgtgtgtcttatatgatcacacagggagtgatttatattaaactgtacagaaaccattatgtaatatacatgatgtgggacttattctatcatatatactatagtattctaacactccccctcaagctggtgcgtatatattgtgagcacacagcttgttacatatatattcaacccgaggacccctaagagctttggtgaagatatctgcgagttgatcgttggagttgacaaatgctgtttgaatttcccctgactgaatcttttctcgaatgaaatgacaatcgatttctatatgtttagtcctttcatgaaaaacaggattagaggatatatgtagagcggcttgattgtcacaaataagagtcatgggctgtcgttgtgcacaaagatgaagctccttaatcaactgctttaaccagatcagctcacaggcagcgacacccattgcacgatactcagcctctgcactagatcgggctacaacagtttgtttcttactcttccaagagattaggttcccaccaaagaagacacaataacctgaagtagatcgtctgtctgagggtgaccctgcccaatcagcatcagagtaaccacaaatctctgtgtgtccctgatccaaatatagtaaaccttttcctggtgctcttttgatataccggaggatacgaatagctgcatcccaatgagaatcacatggggaatcaaggaactgactagccacaccaacagcaaacgagatgtctggcctagtcacagtgaggtaatttagcttcccaactaaccttcgataaggaccaggatcagataacggctccccctgttcaggcaataatttgatattaggatccatgggtgtatcaacaggtttacaccccaacataccagtctcctctaagatgtctaaggcatatttcctttgacagatggagatgccctgtctagattgtgccacttcaatacccaagaagtaacgaagcttaccaagatcttttgtctgaaattgactaaacaagtactgcttcaactggtcaattccaggttgatcactaccagtgataatnnnnnnnnnnnnnnnnnnnnnnnnnnnnnnnnnnnnnnnnnnnnnnnnnnnnnnnnnnnnnnnnnnnnnnnnnnnnnnnnnnnnnnnnnnnnnnnnnnnnnnnnnnnnnnnnnnnnnnnnnnnnnnnnnnnnnnnnnnnnnnnnnnnnnnnnnnnnnnnnnnnnnnnnnnnnnnnnnnnnnnnnnnnnnnnnnnnnnnnnnnnnnnnnnnnnnnnnnnnnnnnnnnnnnnnnnnnnnnnnnnnnnnnnnnnnnnnnnnnnnnnnnnnnnnnnnnnnnnnnnnnnnnnnnnnnnnnnnnnnnnnnnnnnnnnnnnnnnnnnnnnnnnnnnnnnnnnnnnnnnnnnnnnnnnnnnnnnnnnnnnnnnnnnnnnnnnnnnnnnnnnnnnnnnnnnnnnnnnnnnnnnnnnnnnnnnnnnnnnnnnnnnnnnnnnnnnnnnnnnnnnnnnnnnnnnnnnnnnnnnnnnnnnnnnnnnnnnnnnnnnnnnnnnnnnnnnnnnnnnnnnnnnnnnnnnnnnnnnnnnnnnnnnnnnnnnnnnnnnnnnnnnnnnnnnnnnnnnnnnnnnnnnnnnnnnnnnnnnnnnnnnnnnnnnnnnnnnnnnnnnnnnnnnnnnnnnnnnnnnnnnnnnnnnnnnnnnnnnnnnnnnnnnnnnnnnnnnnnnnnnnnnnnnnnnnnnnnnnnnnnnnnnnnnnnnnnnnnnnnnnnnnnnnnnnnnnnnnnnnnnnnnnnnnnnnnnnnnnnnnnnnnnnnnnnnnnnnnnnnnnnnnnnnnnnnnnnnnnnnnnnnnnnnnnnnnnnnnnnnnnnnnnnnnnnnnnnnnnnnnnnnnnnnnnnnnnnnnnnnnnnnnnnnnnnnnnnnnnnnnnnnnnnnnnnnnnnnnnnnnnnnnnnnnnnnnnnnnnnnnnnnnnnnnnnnnnnnnnnnnnnnnnnnnnnnnnnnnnnnnnnnnnnnnnnnnnnnnnnnnnnnnnnnnnnnnnnnnnnnnnnnnnnnnnnnnnnnnnnnnnnnnnnnnnnnnnnnnnnnnnnnnnnnnnnnnnnnnnnnnnnnnnnnnnnnnnnnnnnnnnnnnnnnnnnnnnnnnnnnnnnnnnnnnnnnnnnnnnnnnnnnnnnnnnnnnnnnnnnnnnnnnnnnnnnnnnnnnnnnnnnnnnnnnnnnnnnnnnnnnnnnnnnnnnnnnnnnnnnnnnnnnnnnnnnnnnnnnnnnnnnnnnnnnnnnnnnnnnnnnnnnnnnnnnnnnnnnnnnnnnnnnnnnnnnnnnnnnnnnnnnnnnnnnnnnnnnnnnnnnnnnnnnnnnnnnnnnnnnnnnnnnnnnnnnnnnnnnnnnnnnnnnnnnnnnnnnnnnnnnnnnnnnnnnnnnnnnnnnnnnnnnnnnnnnnnnnnnnnnnnnnnnnnnnnnnnnnnnnnnnnnnnnnnnnnnnnnnnnnnnnnnnnnnnnnnnnnnnnnnnnnnnnnnnnnnnnnnnnnnnnnnnnnnnnnnnnnnnnnnnnnnnnnnnnnnnnnnnnnnnnnnnnnnnnnnnnnnnnnnnnnnnnnnnnnnnnnnnnnnnnnnnnnnnnnnnnnnnnnnnnnnnnnnnnnnnnnnnnggtctctattaccacataggtgattagtggccccagagtcaataatccaaggtccaagtgaagattgtgaaagacaagcaacatgattaccaggatccaaggttgggccagtacgaggaacaggggatgaaggatgcatcttccggaagagagcttggagagtctcataatcagcagtagaaagggtaacctgatcagaagaggccgatgctggtggaatgtcagcctgagcaagattagcggtggatgatggtcggagatgaggatacttggtgtaacaacgttcttcaagatggccaagattcttacaatagttacaccgagggcgctgtcctcgacccccttgaccacggccacgaccgcgaccacgcccattgccagagaaagaatcaggagcacgagaaactaaagcagcagaagtctgagaaatacctgaatcaacagaagaaacgatcttacccccacgagtaagaagacgctggaaggtctgggataagctgggcttgtcagtgctagtcagaatattctcccgaacaccatctaattcatcaggaagagtagcaagagtgacagccataaagaaacgctccacctgggatctatattcagcagggtccttaggataaggaagcatagtgaggaagtcctgcaacaaagacttaattctaccaacgcgcatctccatatgagggaaggaagatgtgcgaagatcaataatctgagagacaatatcaaaaaaatgctgaatgtcattcgtgtacaggctcttggcctctgtccatacctcataacaagtcctataggccgtaaagatgcaactgagtgaggggtcaatagactgccacaaataagtgagaagttgagcatcaatcttcttccattgggcctgctgagcagcaggaacagaccccaaatttgtggtgagatgatcctcatgtccatgaccggtaaaccaaatgacaacggaggttgaccatgaggtatagttctcagaaccagtcaacttggaggtcgtgataaatggagcaggggcagacagaccaccaacagagcctttggataccgcagtagaggaatcacccatggtatcacaaacgggaaaaagatatgcaaaccggtcaaaggtggcgcgtgaagcccacgcgcaaggagactggcggcgcgggtgggcgcgtgcgacgtcagatggcgatgcgacctagacagagatggtcgccggacgaagacgattcttccggggtggttttcgaatgaagactcaccggaaaaagaactccggtggctgagacggtggttctggcggctgagacggtgatccgggcggtggcaaacgatcgggaacaggccggaaaggacacacggcagtgaaggactcgccggaaggacgcacggcggatgagggctcgccggaaggacgcacggcggacgagggtttgccggaaggacgcacggcaaggaaggagataacgcctaagcagtgggcttagggttttgcggaagcgaaggcccagaataaagagctctggtaccaacttgagattggagaattgtgtgtcttatatgatcacacagggagtgatttatattaaactgtacagaaaccattatgtaatatacatgatgtgggacttattctatcatatatactatagtattctaacaattggaatttggggcatgggtggattaggaaagacaaccatcgccagtgctttatttgccaaattatcatctcaatttgaaggtagttgcttcttggcaaatgtaagggaagaatatgaaaatcaaggactgggttatttacgaaataaacttttttctgaggtactggaggatgatgtgaatctccatattagcacccccaaagtaagatccacttttgttatgaggaggcttagacaaaaaaaggttttgatagttcttgacgatgtcgacgaatcaaagaaactagaatatcttgctgcacaacatgattgtttgggatctggaagtatagtcattgtgaccaccagagacaagcgtgtccttagcaaaggggtagacgaaacatatgaggtcaagggattgtcccttcaccatgctgttaggctttttagtttgaatgccttcgggaaaacctatcctgaaaagggctttgaaatgctatcaaaacaggtggttgatcatgcaaatggcaatccattggctttaaaagttttaggttcacttctccattccagaaatgagaagcaatgggccaatgctttgagaaaactaatgaagtttcctaatgcagagattcagaatgtcttaagatggagttatgatatactagattatgaacaaaaaaatatgttcctggacattgcatgctttttccgaggagagaatatagaaaatgttataaggctactagatatttgtggtttctatgcatatattggtataaaaatccttcaagaaaaaagtcttgtaactttttctgatgacggtaaagtgtgtatgcatgacttgatacaagaaatgggctgggaaattgttcgtcgggaatctatcaaagatcctggaaggcgtagccgattgtgggatccaaaagaagtctatgatgtactgaaaaataacagggtaagaaagatatactgaattccctttttaaacacatgctggaaagctggttagtgtggtactttttatcatctcacattgtagtttttgtttgtcagggaactgatgcagttgaaggcataatcttagatgtgtctcaaataagtgacttgctcttgagctatgagaccttctcaaggatgatcaatataagatttctcaaattctatatggggaggggtaggacatgcaatttgctccttccttcaggtctcaaatcattgcctaataaattaatgtacctacaatgggatggatacccttccaagtctttgccatcaactttttgtactgacaaccttgttgtgctttccatgatggaaagccatgttgaaaaactttgggatggaatcaaggtaatgacttttattttacagcaggtcttgtatgtttgtgctattaaagcctttgttttttcattctttgttactgcagagttttgcaagtctgaaagagatcaacctccgtgccagcaaaaagttaactactctcccagatttatctctggtgccaaatcttgaaactatagatgtttctcattgcacaagtctgctccatgttcccttatccattcaatatgtcaagaagcttcttctgtttaacttggaatcctgcaagaatcttgagagtcttccaataaacgttcaattggcttctcttgaaatgttcattctcagacgctgttcaagtcttgacgagttttcagtgacttcaaagaacatgacacgcctagacttgagagaaacagcaataacatatttcccagaatatctttgggagcatctgaacaagcttgtttacttgaatctggaatcctgcagcaagctcaagagtcttacaagcaaaattcacttaaaatctcttcaaagactcagtctgagagattgttcaagtcttgaggagttttctgtgacttcggagaacattggatacttgaatttgagagggacatcaataaaagaattgccaaaatcactttggcgcaataacaagctttttactttggttcttcattcctgtaaaaaacttgtgaattttcctgacagaccaaaacttgaggatctgcctctcattttcaatggggtatcctcctctgaaaggccaaatacggataaaccatggactttgtcatccttagcagatttatctctaaaaggaagcagtattgagaatttacctgtaagtatcaaagaacttcctagtcttaaaaagcttaccttgactgagtgcaagaaacttcggtctttaccaagccttccaccatccttggaagacttatccttagatgaaagtgatattgagtgtttacctgtaagtatcaaggatctttctcacttgaaaatacttaccctaaccaactacaagaagcttttgtctccacaagacctgccatcatcttcaaaagcttcattactaaatgaaagtaaagatgattcgcatcttgtgagcatgaaaggtctttctcatctacagaagtttcctctggttaagtggaaaaggtttcattctctaccagagcttccaccattcttggaagaattttcactaagtgaaagcaatattgagtgcatacctaaaagcataaaaaatctttctcatctgagaaaactagccttaaaaaagtgcacagggctttggtatttaccagagcttccaccatatttggaagatttgtttgtaagtggatgtgatattgaaatcttgccaaaaagcatcaaagatgttattcatttgcgaaagatcaccttaattgagtgcaagaagctccaggctctaccagagctcccaccatgcctgcaaagcattttgtgcaactgactgcagatcacttgagattgttcgaagttcaaagactgtcttaatagaagatagatatgcatactattacaattgcataagcttggatcaaaattcacgcaacaatatcattgcagatgcaccctttgaggcagcttatacttctttgcaagaaggaacacctcttggtcctctcatttctatttgtttgccaggaactgaaatcccagactggttcagctaccaatcaacaaattcttcactggacatggaaattcctcaacagtggttcaaagattcaaagttcttaggttttgccctgtgccttgtaattggtggtttccagcaaaacagttatgaagggtatgatccagatgtcaagtgttatcactttgtgaagtctgcctttaactctgaccccagtgttccctttcttggccattgcacaactgtaatgcaggtgccacaaggttttaattcagaccatatgtttatatgctactatcccacttttaatgcctccattctgcaagatttcaaggatttaggcttgtactatgatgccaaaagcttaaggctccgagtcatctttaaatttaagggtccatatcaacggttggacattgtaaagaagtgtggggtcagacctctgttgattgctaatactgaaaggcttcacatagaaagtgaactacaacctgaatagaagggagtatgaaattgaaactgagattttgatgaaatatattatagtagtaagaattaagagaaccatgaaccaacaacggttgacacaagtgataatggtggcttgtgtcccttaaccaaatggttcaggatttgaatcttggttgacccttgggtatgaaataaattgtattgggaggggaatgtctatattgtgtgcactcaaggtctgcgatgaagattagtcattactttcggtgggaactactttgtaccaataccatggtcagaaaaaaaagaaaaaaaaaaaaccatgagtacaacctgaagcaaagtaaaagatttgaatccaaatggttgctgagtaagagagtgtgtccttgaaaccttaggtatgtcactctaaaatctgctttcaaccttacttttcatgcatccattagtactgtgaagtttccatttgatagcatagcaactcctgatcatgttaagggaagaaaaaaatagaagtaccacttgaaactttttccaatagttatcatcattcaaaatgtctcgagtgaaatgagtgatgatggcctgataaaataaaataaaaaaatatatttttatccatttctaacgagttaatgaatgcttttcttttgttttgttttttatgtactatttttttgttttggtgtactaatgaatgttttgtttagtttagttttaaaaaataattaatttttttaaaaaaaaaggtcttaagaaactgtatattaagtaattactttctttaaattaaactgaacaaaaatacattaattttagagcattttatatgccaaatgtaacactttgaatgaacacatttttcaggacaactttgaggattatagtgatgacccggtaacctggtctgagggtgtgtagataaagaggagggacctgaaaaattgctgaacccgcaatcattgtttgtagcacaaagattcaaattgtgagattcaaagttaagacctatgattgattcaagcaacgttaaccattacgccaacttaattaatgactggacagagtcttttgttatttaaataaatttcatttgagtccaagtctaataatgttaattggatatatatactttattattaaataaatttcatttgagtctcagtttagtggaatccacgtgaaatcacctaataatagagtttctcttcaaataactagtcttgcattgtttctaactaaagaaataacgatagttccagtgtcttgaacagtaatgcgcaatatcaaatgaagaaattaacaataacatgctctgtttcttcactgactaataaaaaatatcagatactcattgcaattacacaaaaactgtgcagtgatgaacaaatgtatctctaataagtagttaaatactatattgttagttataaatataataatacatgaatatcattagataacgctagttttgctttacaaagttttcagtatatcttagctctcttttagtagtggacttcaacccagtatttaacaagcatactataaaattgtaccagtacaagaacctgccgatgtcttctggaccgcaatctgaatggaatctcaagacaaaattggtggaagttggcattcacggtaattccgagcatcggatacaagcataattcaaaagcttggacacaaggctatctggttcagggatgagagaaaatgtcacgctgttccagaaatgaaatgttaacgaattgtgcaggatactttcaagcagcacatcttgttgagctttctcagtctctgttgtcggtgcaatgaagtatctgtttacagtttaattcaggtaaggtacacaagcacaaaaaagagaggcagtgtcactctccaagttagactcgagcaataaagccaaccagtgaaaaatgccaacacatgtatttctaataaaacctacgtcctaaatgtattctcgatcaattgagacaaatgtaaatttaccttgttatgttctgagaactaacagggaagaagatataagagggttctactttcaactccaagtgcttaacagatttattctcatctcctaaatattttcgagcaaccctcgtcaacagatcagcaccattccctctcaaactggtatcatcatatgtcatgtagaactcttccaaacactcctttatgaacaaactgcatagaacagatagtcaatctcaaagaaagtctcacacagtgcagaattaattaattgaatttgcacctatgtatcactatatcattcaaattgattatgaaaaggcatggcatcatacatttcaaccagaatgtccataatttaatcttcaacttcaatcaaatctatcaataaaattatcctctctttttttctccatttccattggggtcctaacattttggtttccaagcttatgcactggaggagacaaatgctgttggaatcccaaataaaaaagaaggacaagcctcccaataaatgggacatcgacaaagtgtgcatctccatatggcagttatggtgacaacagcaaaattgaacaggataaaaatgtgcacattatgcttactcatgcataagtcataacaaaacagtcatgttactctaatggaatataaaaccaacttaaacacaatggacagtatgaaaagcatacccaactacaagaaccaagtcttatcccattaagtgggtatgactacaagatcaaactatcaccattaaggtttcataaaaagagatgcaagagaataaacggcaaaatcacgtttaagtttattaaaatgggggtcttgaatgtccaaattctgttctgtgatggaacctcaatggggtttaataagttctttgaaaatcatgtttccaaaatgaaatcatactggaaagatagaaagcatgctaacaatacctgtgtcttggaaaagacattacagcaccattcaaagcacttccagcaccatgaccctccataccaacagaattattaagaaaagaaatcggcttcaacacgatgatatctgaatctagatagatcccaccatacctgacaaaacagaagaaaatgtcattgcaacaattttgatccttagactttttcccacaaaaaaacatcagaaacagtcagctcacaacttactccaatagataaacagcggaatgaagtaagtactacataccatcaccatgttcaatacatcaccaaattactatactaatacacctaagcaatcaccaccaactacacaaaacaaccaagaaaacttacttgtacagagcagcaaggcggataagctcactgtaatgagtagaatagaaatttgtcttcttccattcaaaccacacagaagcaaaaatgtgagcaggcatatccttcagcagctcatcaagatttggcatagcaacagcaactttgtacctgataaaagcaattcctcgattctcagcaatggaaattcaaaacaacatggtaacttgagcaataagaaagcaaaatctagaccatgagaggcgacaattacccgtccttaacaaagctgtccttgaagaaatcaagttccaccgtctcggagaacacaacaacacaagcatcggggtgatgaaagagcaaactctcgagaccacgctgatgccgaacagtgtacatccaaggcggcgaattccacaccataaacactctagtaacacatttccccaccctgaaaaactcatccatgaaatcactgaacgacaatcgcagcagcggcaatccagggtagtagccccaagtatccccatccgcatacacatgattcgccacagacacacccctagcagcaccaacaacatcaacatctttctcaatgctcgattcaccaccattgctaccagaatttacaacaagattcttcacagacacacttctatcagcaccaataacatcaacatctttctgaatgctcgattcaccaccattgctaccagaatttacaacttctttaataatctcattattattatcatcatcatcattgttgttgtggttatgattcaaagttctgcgttctgtgccaactttggtgagagtgttgacattgacattgacatcaagaggagccttcttcttgataccagggaatggaactttcttgaactcatggatccaccacttctggacaattctgtcccccctggtgagaccggtggtggcggcgccggcgtcgggatcttgaagcaaggggttgttgagagggttaagcacgtcgaagttggatctgaacattctatcttttcttaaaaacacgctcttcttgtcgaaccagtcgctccatccttctctcaagggagaggttttgagcagcagcgcgtcgtcgattgtggccacacgcgccgccatggaacggacggtgaagtccacggggacgtcgtcggaggcgaatgcggttttggaacggtcatcattatcggagaaggattggaaggggaaattattgttgttgtcggagtgacggtggtggaaggagcagcggatggaggcggagaggggatcgaagaagaggtggtaggggggagggttgaggcggagggaggggggatctagggtttcgtcgatgaagtcgagctcgtcgatggggtcgtcggaggaggcgatggagatgtcggcggaggtggagtgggaaacgagggaggggcgggggaggtggtgggagtgggggtgggagcgggagaggcgggagtagaggagggagacggagaggaggaggagcacggcggagatcacggcgcagaggtaggcgccgtaaggggagcgccgccgtgaacgaagcatttgactaaactctgaatgaaatctatgtatctatcatttatgtttgactctgtcgtcttcaattcgtctcgtttcgttactgtaatagacagagccacatagggaagaggaaaaacaatgaaataacgtttacttgtagttttgaacacgagtatccccatctggtactaaggaatcagaattcagaacccttccaagaaaatccgacagctgatattttattgagtaaatttaatttttaaaaaatacatatttactaatatttaagtgatcttcgcaaaaacaaaaacaaaaaaagactaatatttaagtgattttcattcagtaagagtttaaataaggttttttctaccaataagttccagcaagactttggctattgggatctttgcttccaaaaaaaataaaaataatagaagagtttaaataagtttctttttttcctgaatagaagaagagtttatataaggttaaattaccatgtttctgaactatttaagagtttttatattgttttagagtaaaaaaatattattttggtctctaacttcaaaaggtaagtttctaaaattgttttatgataaccaaaaaaatgatcagaaataataatttataacagttttataacttataaaaactcggttaaaaaaattatgatgagaattcaattaaaaataataactttaaggacttattaattaatttaaacttcaaataaaataccaaacttagctttcctgaaattcttatacataaaaattttaaataaaatagactctgtacttcttaagattaaattttatagaatacaacaaacttaccgtggcgtctttctaattggttggataaaaattcaaaatttcaaccacagaaaatccgctttccaatccgctgagctttatttgtcgcaagtaatgtatgtttttacttgagttttacaaaagaaatatctttgaattattttttttaatgtaaaatatttccacaattataattaaaatatgattttttaaaaatgaaataaaatccccaacatgctcatcacatgtaccttttgatttgttttattcttgcgcttgtctttcgcgtagtttcgagatattacagaataaaatcagttctgaagaagaatgaatttcatctatgaccatgtttctaagataaatcactttaccattcattgaaaataaagtggtattgaacttcaacaaaagctatcatcgaatagaaagaagaataatagacaaaaatgaaaattacaacaaaggaaaaaggacttctattagtttactcatctggatatgatactgaatacacactgaccaaaacaaaacctgctaatttgagagagggaagggggcattttctccacaactagtaaatcacaggcgtttaagatcaaaccgcaaccaccaaatgggcaatagcactgaagaagccaacacaatctgaaattcagcagcaacgttaaatcctggtttgaacagacgggaagtgtcatatataaccgacgttaaatcctattttttttttggtagtaaacgcttcatgatagctatgcctttgtgcattgcatttgcatgaaataaaaagactaacagctttcaagaaccatctacctttcttctcgttaggtaaaagggtagaagtttgaaaacagcagactgccaagaaaaatgtatgccatagagtatgcccatatcacgtatccccatctaaagtactttgcaggattcgccattatatatgaagcaaaccaataaagaggagggctggcagacaagaaacgagttgacacctgttaaatgtcgattaccaaaagttcacattagcaaaaaatttcagccattcttaagcaacaaaatggatatgatagaaattgattaaaaggtgcaataggtaaacagtaaagtgggatagcagaaaatgaagggtgcatctatacttttcttgtggccaaatactatgtcaattttcattaccccatttttcaccaagtacaccctcggtgaccaagtttagaacatttaagcaatattcaggggcaggtcttaaaacataattagaaaaagttgaagttcactcatgataaatagaagcagaaagaaagcaatacagttgacattacctgtacatgcatgacaaaaaaagcagtgcatgccatgaatcccaagtgtagcacgaatgggagaacagaagcagacaagtatcccggccaaattgctgcaggctcaggttccatgggaacattagcaatgtctcccttgctcacattctttctcctcctaagattggagtgttctggtgcaggagtgagtagtgttatggttgcaatgacaacatataaagctttattgtataatctgaagtcacatgcttatatgctgtatagtatatagaacaatgaatgaaggaattaagcacagtgtgtaactctgtacatatatcaccaaataggaatgaccagacaaacaacaaaatggttgaaccacagatgtgaaagaatgaaaatagcagtaccacataaaaccatcaaagtggatgatttaattattatacccaagtcagtgaattatttacctcacaaagcaatgtacttccaactaatgcaaagtaaaacacaattatctgtttgagaatcataccttctaccctaacagaggatttttccacacttccagcttctttggaccttgagagttcatctgataaaaacacaactccacagcccttttcttccataggagttaaaaatcccagagagaaaaagttctgaggccttgacttagcataatggacaactgagcaaagtgccagagacagtattggagatgcaagaagaaagttaggcaactgtttcagctgaaaatatctcaagaaacctacacccctggacaatcagaaattaacaaccttcactggaaaatctgactatttaaattttaaacatccaagttccaactttatagacaacagagaaaatacatcataataggttgcatagactagagtataataattcagccaatagcatagcattagcaaaataaatcaacaaaactattgaaacttaaaaatgaccataccaataatggctttggatgtaattgtaaagtaacggtattcttgccttgcaccagggccttatttcatcaggggaacgttcaacacacatattgtaatagccataagcctggaaagctacaaatggagcaaaaatacatgcagtacggaaagctccaacgataacaatctgcaaagccaactggcacaatgacaaagaatcagtcagtattccagtttataattcaaactaacaacgtttgaaatctttttcttttcaaatgacatggaaatcaatcctagaacatctaccctaactacttgagctacatctatatgtcagtttacaaatgttcctataacacatagttaaagaaaaattattagttctagatatatttactttctactctatgacctatcacatgtgaaaaaatccacaactgcaaaaaaccctcaaacatacaatattgcacccccaccactctcgtgcccccctaacttccacacctaataggctaatatcataaacatccatactccttgtcaataaaatttgccatcaaaccttccaaataacgaagaaacaaatatatttctttaagctagaagcctagaagccatgctgactaaattcaccctctcattttccattgaatgccaacaactacattcgtaatttcacactgcttgacatagttgcttcaaattcccaagcatagaaaaccatttttaacattaatcaatacaatgacagtcatgtgagacttaatgcaaatgagatttattaagatcctgttaggaaaaacttctatataaacatttatagtaaaaagacaacaaaaaggtaaaatgaattgagtttctccaatggattaaaaattaatattaacttatgcatcttagcttctctgaagaagttagataagagagcttctataaaaatgaagtacctaaattcagtttatcttcttattgaagtgctaatggagaattttatccacacaggacccaagggcaaacacttattctctctccagtctcaaatataagcataaggcaatgtaagttagtttatcttttcttatatttgagaccagagggagtaagtaattacacaatgtaggaagtaagagatagtgaagaaactaacagcaacacgctttttgtgaaacacagcatgataagcccgatgcatagtctgaaaacagaagtagccagcattcagcacgccattagacctcgcacagcccgagagcgcgaagaaaagaacagccaaattgtttccgccagacacgaagtgatacattcctccaaaacacagaaatgcatacaaactctccgagtatctgtcatcacacaaaccaaacaccaagtcacaaagaaacataaaacataaacacttaggaatgctagcgacactctctctaacactctccctcagagactctctctgtgattgattaaaatttattagaaatcatcaattttggtgggtttcgcttctcaaaaatggtgatttccaataaattataaccaatcataaagagagtcttagaaagtgagaaagagagtgccgctggcacttctcaaacacttaaatatgaatttcgttccgataagttcgcgctttttcaattttggtactttgcaagtttttttttttttctttccaattttacttcatctaagtttgtgttttcccaactttactctctgcagaaacataaacacttacagagaccaaaattggaaaaaacgcgagcgaaccttgaaagcccgtttaaagagcattacatggatgagtaaaatacagaggcgggattaaagcagaacaaaacggtggcacgaagcgacgtttgggggtccttcaagacggatagggagagtttgtagaagtaaagcgcggcgagcacgaaggagaggttgttgatgacgtaagcggagagaacgaggagggatctattggggagaaagaaggagaagaaagaagctgagagaggaaggaggggtaagaaggcgaaggtttgttcgtactcgtagccgcattgggcgatgcggaggaagtagacggagtcccaaacgacgccgttttctaggggggaagggtgagtggtggcgttgggggtggagaggcatggagggtttaagggtgcggaggtgtcgtaaggagaaaggagggtgcggaagaggatgattagggttaggagaaggagtctagaatatgttgctgattttagaaccaagagttggtgatgctgtgctgatatttccaacatcttggaatggaaccgatctgaatcaaatcaatcctgtgatcccaccgtgttaactgccaagggcgcctcactccaatatgtatttctttttcttttttttttttttagtagaccgattatgtatttcaaaaacaaaaaaataaaataaaattatgctttatttaaagaaatagatctacaacataaataaataaaattaaacaagagtttaattttcattttttttgggtacaacaggcaggaaaagcaaataaagtaagaacatgtttgaaaataaactatcaatcattattaatcagtttttgggcaaaagaacctaaataatacactttaaataaaaaattaccaaaaaggggctgtttnnnnnnnnnnnnnnnnnnnnnnnnnnnnnnnnnnnnnnnnnnnnnnnnnnnnnnnnnnnnnnnnnnnnnnnnnnnnnnnnnnnnnnnnnnnnnnnnnnnnnnnnnnnnnnnnnnnnnnnnnnnnnnnnnnnnnnnnnnnnnnnnnnnnnnnnnnnnnnnnnnnnnnnnnnnnnnnnnnnnnnnnnnnnnnnnnnnnnnnnnnnnnnnnnnnnnnnnnnnnnnnnnnnnnnnnnnnnnnnnnnnnnnnnnnnnnnnnnnnnnnnnnnnnnnnnnnnnnnnnnnnnnnnnnnnnnnnnnnnnnnnnnnnnnnnnnnnnnnnnnnnnnnnnnnnnnnnnnnnnnnnnnnnnnnnnnnnnnnnnnnnnnnnnnnnnnnnnnnnnnnnnnnnnnnnnnnnnnnnnnnnnnnnnnnnnnnnnnnnnnnnnnnnnnnnnnnnnnnnnnnnnnnnnnnnnnnnnnnnnnnnnnnnnnnnnnnnnnnnnnnnnnnnnnnnnnnnnnnnnnnnnnnnnnnnnnnnnnnnnnnnnnnnnnnnnnnnnnnnnnnnnnnnnnnnnnnnnnnnnnnnnnnnnnnnnnnnnnnnnnnnnnnnnnnnnnnnnnnnnnnnnnnnnnnnnnnnnnnnnnnnnnnnnnnnnnnnnnnnnnnnnnnnnnnnnnnnnnnnnnnnnnnnnnnnnnnnnnnnnnnnnnnnnnnnnnnnnnnnnnnnnnnnnnnnnnnnnnnnnnnnnnnnnnnnnnnnnnnnnnnnnnnnnnnnnnnnnnnnnnnnnnnnnnnnnnnnnnnnnnnnnnnnnnnnnnnnnnnnnnnnnnnnnnnnnnnnnnnnnnnnnnnnnnnnnnnnnnnnnnnnnnnnnnnnnnnnnnnnnnnnnnnnnnnnnnnnnnnnnnnnnnnnnnnnnnnnnnnnnnnnnnnnnnnnnnnnnnnnnnnnnnnnnnnnnnnnnnnnnnnnnnnnnnnnnnnnnnnnnnnnnnnnnnnnnnnnnnnnnnnnnnnnnnnnnnnnnnnnnnnnnnnnnnnnnnnnnnnnnnnnnnnnnnnnnnnnnnnnnnnnnnnnnnnnnnnnnnnnnnnnnnnnnnnnnnnnnnnnnnnnnnnnnnnnnnnnnnnnnnnnnnnnnnnnnnnnnnnnnnnnnnnnnnnnnnnnnnnnnnnnnnnnnnnnnnnnnnnnnnnnnnnnnnnnnnnnnnnnnnnnnnnnnnnnnnnnnnnnnnnnnnnnnnnnnnnnnnnnnnnnnnnnnnnnnnnnnnnnnnnnnnnnnnnnnnnnnnnnnnnnnnnnnnnnnnnnnnnnnnnnnnnnnnnnnnnnnnnnnnnnnnnnnnnnnnnnnnnnnnnnnnnnnnnnnnnnnnnnnnnnnnnnnnnnnnnnnnnnnnnnnnnnnnnnnnnnnnnnnnnnnnnnnnnnnnnnnnnnnnnnnnnnnnnnnnnnnnnnnnnnnnnnnnnnnnnnnnnnnnnnnnnnnnnnnnnnnnnnnnnnnnnnnnnnnnnnnnnnnnnnnnnnnnnnnnnnnnnnnnnnnnnnnnnnnnnnnnnnnnnnnnnnnnnnnnnnnnnnnnnnnnnnnnnnnnnnnnnnnnnnnnnnnnnnnnnnnnnnnnnnnnnnnnnnnnnnnnnnnnnnnnnnnnnnnnnnnnnnnnnnnnnnnnnnnnnnnnnnnnnnnnnnnnnnnnnnnnnnnnnnnnnnnnnnnnnnnnnnnnnnnnnnnnnnnnnnnnnnnnnnnnnnnnnnnnnnnnnnnnnnnnnnnnnnnnnnnnnnnnnnnnnnnnnnnnnnnnnnnnnnnnnnnnnnnnnnnnnnnnnnnnnnnnnnnnnnnnnnnnnnnnnnnnnnnnnnnnnnnnnnnnnnnnnnnnnnnnnnnnnnnnnnnnnnnnnnnnnnnnnnnnnnnnnnnnnnnnnnnnnnnnnnnnnnnnnnnnnnnnnnnnnnnnnnnnnnnnnnnnnnnnnnnnnnnnnnnnnnnnnnnnnnnnnnnnnnnnnnnnnnnnnnnnnnnnnnnnnnnnnnnnnnnnnnnnnnnnnnnnnnnnnnnnnnnnnnnnnnnnnnnnnnnnnnnnnnnnnnnnnnnnnnnnnnnnnnnnnnnnnnnnnnnnnnnnnnnnnnnnnnnnnnnnnnnnnnnnnnnnnnnnnnnnnnnnnnnnnnnnnnnnnnnnnnnnnnnnnnnnnnnnnnnnnnnnnnnnnnnnnnnnnnnnnnnnnnnnnnnnnnnnnnnnnnnnnnnnnnnnnnnnnnnnnnnnnnnnnnnnnnnnnnnnnnnnnnnnnnnnnnnnnnnnnnnnnnnnnnnnnnnnnnnnnnnnnnnnnnnnnnnnnnnnnnnnnnnnnnnnnnnnnnnnnnnnnnnnnnnnnnnnnnnnnnnnnnnnnnnnnnnnnnnnnnnnnnnnnnnnnnnnnnnnnnnnnnnnnnnnnnnnnnnnnnnnnnnnnnnnnnnnnnnnnnnnnnnnnnnnnnnnnnnnnnnnnnnnnnnnnnnnnnnnnnnnnnnnnnnnnnnnnnnnnnnnnnnnnnnnnnnnnnnnnnnnnnnnnnnnnnnnnnnnnnnnnnnnnnnnnnnnnnnnnnnnnnnnnnnnnnnnnnnnnnnnnnnnnnnnnnnnnnnnnnnnnnnnnnnnnnnnnnnnnnnnnnnnnnnnnnnnnnnnnnnnnnnnnnnnnnnnnnnnnnnnnnnnnnnnnnnnnnnnnnnnnnnnnnnnnnnnnnnnnnnnnnnnnnnnnnnnnnnnnnnnnnnnnnnnnnnnnnnnnnnnnnnnnnnnnnnnnnnnnnnnnnnnnnnnnnnnnnnnnnnnnnnnnnnnnnnnnnnnnnnnnnnnnnnnnnnnnnnnnnnnnnnnnnnnnnnnnnnnnnnnnnnnnnnnnnnnnnnnnnnnnnnnnnnnnnnnnnnnnnnnnnnnnnnnnnnnnnnnnnnnnnnnnnnnnnnnnnnnnnnnnnnnnnnnnnnnnnnnnnnnnnnnnnnnnnnnnnnnnnnnnnnnnnnnnnnnnnnnnnnnnnnnnnnnnnnnnnnnnnnnnnnnnnnnnnnnnnnnnnnnnnnnnnnnnnnnnnnnnnnnnnnnnnnnnnnnnnnnnnnnnnnnnnnnnnnnnnnnnnnnnnnnnnnnnnnnnnnnnnnnnnnnnnnnnnnnnnnnnnnnnnnnnnnnnnnnnnnnnnnnnnnnnnnnnnnnnnnnnnnnnnnnnnnnnnnnnnnnnnnnnnnnnnnnnnnnnnnnnnnnnnnnnnnnnnnnnnnnnnnnnnnnnnnnnnnnnnnnnnnnnnnnnnnnnnnnnnnnnnnnnnnnnnnnnnnnnnnnnnnnnnnnnnnnnnnnnnnnnnnnnnnnnnnnnnnnnnnnnnnnnnnnnnnnnnnnnnnnnnnnnnnnnnnnnnnnnnnnnnnnnnnnnnnnnnnnnnnnnnnnnnnnnnnnnnnnnnnnnnnnnnnnnnnnnnnnnnnnnnnnnnnnnnnnnnnnnnnnnnnnnnnnnnnnnnnnnnnnnnnnnnnnnnnnnnnnnnnnnnnnnnnnnnnnnnnnnnnnnnnnnnnnnnnnnnnnnnnnnnnnnnnnnnnnnnnnnnnnnnnnnnnnnnnnnnnnnnnnnnnnnnnnnnnnnnnnnnnnnnnnnnnnnnnnnnnnnnnnnnnnnnnnnnnnnnnnnnnnnnnnnnnnnnnnnnnnnnnnnnnnnnnnnnnnnnnnnnnnnnnnnnnnnnnnnnnnnnnnnnnnnnnnnnnnnnnnnnnnnnnnnnnnnnnnnnnnnnnnnnnnnnnnnnnnnnnnnnnnnnnnnnnnnnnnnnnnnnnnnnnnnnnnnnnnnnnnnnnnnnnnnnnnnnnnnnnnnnnnnnnnnnnnnnnnnnnnnnnnnnnnnnnnnnnnnnnnnnnnnnnnnnnnnnnnnnnnnnnnnnnnnnnnnnnnnnnnnnnnnnnnnnnnnnnnnnnnnnnnnnnnnnnnnnnnnnnnnnnnnnnnnnnnnnnnnnnnnnnnnnnnnnnnnnnnnnnnnnnnnnnnnnnnnnnnnnnnnnnnnnnnnnnnnnnnnnnnnnnnnnnnnnnnnnnnnnnnnnnnnnnnnnnnnnnnnnnnnnnnnnnnnnnnnnnnnnnnnnnnnnnnnnnnnnnnnnnnnnnnnnnnnnnnnnnnnnnnnnnnnnnnnnnnnnnnnnnnnnnnnnnnnnnnnnnnnnnnnnnnnnnnnnnnnnnnnnnnnnnnnnnnnnnnnnnnnnnnnnnnnnnnnnnnnnnnnnnnnnnnnnnnnnnnnnnnnnnnnnnnnnnnnnnnnnnnnnnnnnnnnnnnnnnnnnnnnnnnnnnnnnnnnnnnnnnnnnnnnnnnnnnnnnnnnnnnnnnnnnnnnnnnnnnnnnnnnnnnnnnnnnnnnnnnnnnnnnnnnnnnnnnnnnnnnnnnnnnnnnnnnnnnnnnnnnnnnnnnnnnnnnnnnnnnnnnnnnnnnnnnnnnnnnnnnnnnnnnnnnnnnnnnnnnnnnnnnnnnnnnnnnnnnnnnnnnnnnnnnnnnnnnnnnnnnnnnnnnnnnnnnnnnnnnnnnnnnnnnnnnnnnnnnnnnnnnnnnnnnnnnnnnnnnnnnnnnnnnnnnnnnnnnnnnnnnnnnnnnnnnnnnnnnnnnnnnnnnnnnnnnnnnnnnnnnnnnnnnnnnnnnnnnnnnnnnnnnnnnnnnnnnnnnnnnnnnnnnnnnnnnnnnnnnnnnnnnnnnnnnnnnnnnnnnnnnnnnnnnnnnnnnnnnnnnnnnnnnnnnnnnnnnnnnnnnnnnnnnnnnnnnnnnnnnnnnnnnnnnnnnnnnnnnnnnnnnnnnnnnnnnnnnnnnnnnnnnnnnnnnnnnnnnnnnnnnnnnnnnnnnnnnnnnnnnnnnnnnnnnnnnnnnnnnnnnnnnnnnnnnnnnnnnnnnnnnnnnnnnnnnnnnnnnnnnnnnnnnnnnnnnnnnnnnnnnnnnnnnnnnnnnnnnnnnnnnnnnnnnnnnnnnnnnnnnnnnnnnnnnnnnnnnnnnnnnnnnnnnnnnnnnnnnnnnnnnnnnnnnnnnnnnnnnnnnnnnnnnnnnnnnnnnnnnnnnnnnnnnnnnnnnnnnnnnnnnnnnnnnnnnnnnnnnnnnnnnnnnnnnnnnnnnnnnnnnnnnnnnnnnnnnnnnnnnnnnnnnnnnnnnnnnnnnnnnnnnnnnnnnnnnnnnnnnnnnnnnnnnnnnnnnnnnnnnnnnnnnnnnnnnnnnnnnnnnnnnnnnnnnnnnnnnnnnnnnnnnnnnnnnnnnnnnnnnnnnnnnnnnnnnnnnnnnnnnnnnnnnnnnnnnnnnnnnnnnnnnnnnnnnnnnnnnnnnnnnnnnnnnnnnnnnnnnnnnnnnnnnnnnnnnnnnnnnnnnnnnnnnnnnnnnnnnnnnnnnnnnnnnnnnnnnnnnnnnnnnnnnnnnnnnnnnnnnnnnnnnnnnnnnnnnnnnnnnnnnnnnnnnnnnnnnnnnnnnnnnnnnnnnnnnnnnnnnnnnnnnnnnnnnnnnnnnnnnnnnnnnnnnnnnnnnnnnnnnnnnnnnnnnnnnnnnnnnnnnnnnnnnnnnnnnnnnnnnnnnnnnnnnnnnnnnnnnnnnnnnnnnnnnnnnnnnnnnnnnnnnnnnnnnnnnnnnnnnnnnnnnnnnnnnnnnnnnnnnnnnnnnnnnnnnnnnnnnnnnnnnnnnnnnnnnnnnnnnnnnnnnnnnnnnnnnnnnnnnnnnnnnnnnnnnnnnnnnnnnnnnnnnnnnnnnnnnnnnnnnnnnnnnnnnnnnnnnnnnnnnnnnnnnnnnnnnnnnnnnnnnnnnnnnnnnnnnnnnnnnnnnnnnnnnnnnnnnnnnnnnnnnnnnnnnnnnnnnnnnnnnnnnnnnnnnnnnnnnnnnnnnnnnnnnnnnnnnnnnnnnnnnnnnnnnnnnnnnnnnnnnnnnnnnnnnnnnnnnnnnnnnnnnnnnnnnnnnnnnnnnnnnnnnnnnnnnnnnnnnnnnnnnnnnnnnnnnnnnnnnnnnnnnnnnnnnnnnnnnnnnnnnnnnnnnnnnnnnnnnnnnnnnnnnnnnnnnnnnnnnnnnnnnnnnnnnnnnnnnnnnnnnnnnnnnnnnnnnnnnnnnnnnnnnnnnnnnnnnnnnnnnnnnnnnnnnnnnnnnnnnnnnnnnnnnnnnnnnnnnnnnnnnnnnnnnnnnnnnnnnnnnnnnnnnnnnnnnnnnnnnnnnnnnnnnnnnnnnnnnnnnnnnnnnnnnnnnnnnnnnnnnnnnnnnnnnnnnnnnnnnnnnnnnnnnnnnnnnnnnnnnnnnnnnnnnnnnnnnnnnnnnnnnnnnnnnnnnnnnnnnnnnnnnnnnnnnnnnnnnnnnnnnnnnnnnnnnnnnnnnnnnnnnnnnnnnnnnnnnnnnnnnnnnnnnnnnnnnnnnnnnnnnnnnnnnnnnnnnnnnnnnnnnnnnnnnnnnnnnnnnnnnnnnnnnnnnnnnnnnnnnnnnnnnnnnnnnnnnnnnnnnnnnnnnnnnnnnnnnnnnnnnnnnnnnnnnnnnnnnnnnnnnnnnnnnnnnnnnnnnnnnnnnnnnnnnnnnnnnnnnnnnnnnnnnnnnnnnnnnnnnnnnnnnnnnnnnnnnnnnnnnnnnnnnnnnnnnnnnnnnnnnnnnnnnnnnnnnnnnnnnnnnnnnnnnnnnnnnnnnnnnnnnnnnnnnnnnnnnnnnnnnnnnnnnnnnnnnnnnnnnnnnnnnnnnnnnnnnnnnnnnnnnnnnnnnnnnnnnnnnnnnnnnnnnnnnnnnnnnnnnnnnnnnnnnnnnnnnnnnnnnnnnnnnnnnnnnnnnnnnnnnnnnnnnnnnnnnnnnnnnnnnnnnnnnnnnnnnnnnnnnnnnnnnnnnnnnnnnnnnnnnnnnnnnnnnnnnnnnnnnnnnnnnnnnnnnnnnnnnnnnnnnnnnnnnnnnnnnnnnnnnnnnnnnnnnnnnnnnnnnnnnnnnnnnnnnnnnnnnnnnnnnnnnnnnnnnnnnnnnnnnnnnnnnnnnnnnnnnnnnnnnnnnnnnnnnnnnnnnnnnnnnnnnnnnnnnnnnnnnnnnnnnnnnnnnnnnnnnnnnnnnnnnnnnnnnnnnnnnnnnnnnnnnnnnnnnnnnnnnnnnnnnnnnnnnnnnnnnnnnnnnnnnnnnnnnnnnnnnnnnnnnnnnnnnnnnnnnnnnnnnnnnnnnnnnnnnnnnnnnnnnnnnnnnnnnnnnnnnnnnnnnnnnnnnnnnnnnnnnnnnnnnnnnnnnnnnnnnnnnnnnnnnnnnnnnnnnnnnnnnnnnnnnnnnnnnnnnnnnnnnnnnnnnnnnnnnnnnnnnnnnnnnnnnnnnnnnnnnnnnnnnnnnnnnnnnnnnnnnnnnnnnnnnnnnnnnnnnnnnnnnnnnnnnnnnnnnnnnnnnnnnnnnnnnnnnnnnnnnnnnnnnnnnnnnnnnnnnnnnnnnnnnnnnnnnnnnnnnnnnnnnnnnnnnnnnnnnnnnnnnnnnnnnnnnnnnnnnnnnnnnnnnnnnnnnnnnnnnnnnnnnnnnnnnnnnnnnnnnnnnnnnnnnnnnnnnnnnnnnnnnnnnnnnnnnnnnnnnnnnnnnnnnnnnnnnnnnnnnnnnnnnnnnnnnnnnnnnnnnnnnnnnnnnnnnnnnnnnnnnnnnnnnnnnnnnnnnnnnnnnnnnnnnnnnnnnnnnnnnnnnnnnnnnnnnnnnnnnnnnnnnnnnnnnnnnnnnnnnnnnnnnnnnnnnnnnnnnnnnnnnnnnnnnnnnnnnnnnnnnnnnnnnnnnnnnnnnnnnnnnnnnnnnnnnnnnnnnnnnnnnnnnnnnnnnnnnnnnnnnnnnnnnnnnnnnnnnnnnnnnnnnnnnnnnnnnnnnnnnnnnnnnnnnnnnnnnnnnnnnnnnnnnnnnnnnnnnnnnnnnnnnnnnnnnnnnnnnnnnnnnnnnnnnnnnnnnnnnnnnnnnnnnnnnnnnnnnnnnnnnnnnnnnnnnnnnnnnnnnnnnnnnnnnnnnnnnnnnnnnnnnnnnnnnnnnnnnnnnnnnnnnnnnnnnnnnnnnnnnnnnnnnnnnnnnnnnnnnnnnnnnnnnnnnnnnnnnnnnnnnnnnnnnnnnnnnnnnnnnnnnnnnnnnnnnnnnnnnnnnnnnnnnnnnnnnnnnnnnnnnnnnnnnnnnnnnnnnnnnnnnnnnnnnnnnnnnnnnnnnnnnnnnnnnnnnnnnnnnnnnnnnnnnnnnnnnnnnnnnnnnnnnnnnnnnnnnnnnnnnnnnnnnnnnnnnnnnnnnnnnnnnnnnnnnnnnnnnnnnnnnnnnnnnnnnnnnnnnnnnnnnnnnnnnnnnnnnnnnnnnnnnnnnnnnnnnnnnnnnnnnnnnnnnnnnnnnnnnnnnnnnnnnnnnnnnnnnnnnnnnnnnnnnnnnnnnnnnnnnnnnnnnnnnnnnnnnnnnnnnnnnnnnnnnnnnnnnnnnnnnnnnnnnnnnnnnnnnnnnnnnnnnnnnnnnnnnnnnnnnnnnnnnnnnnnnnnnnnnnnnnnnnnnnnnnnnnnnnnnnnnnnnnnnnnnnnnnnnnnnnnnnnnnnnnnnnnnnnnnnnnnnnnnnnnnnnnnnnnnnnnnnnnnnnnnnnnnnnnnnnnnnnnnnnnnnnnnnnnnnnnnnnnnnnnnnnnnnnnnnnnnnnnnnnnnnnnnnnnnnnnnnnnnnnnnnnnnnnnnnnnnnnnnnnnnnnnnnnnnnnnnnnnnnnnnnnnnnnnnnnnnnnnnnnnnnnnnnnnnnnnnnnnnnnnnnnnnnnnnnnnnnnnnnnnnnnnnnnnnnnnnnnnnnnnnnnnnnnnnnnnnnnnnnnnnnnnnnnnnnnnnnnnncgcctggttctgggcgtgaccggtcatgccccctcctgggcgtgaccaactgccccattttggtaaatagtttccgaacagcccctttttggtaattttttatttaaagtgtattatttaggttcttttgcctcagtttttgtgtgcggatgataattatcaaaataaaaaataaatcatactttttttctagaaacaatgtattttcataatcagaagtaatgatattaactcttgaagatcaagagaatcaaatctctttcaacatacttaaaaattaaaagtattgttgaatgataatgtaaaaaaatattattattctatgtaatgcatatacgtttttctctattgtatagtgtatatatagtgcatatacgtttgtctctagtattattctttaaaatatgttaaatgaatataaactttaatttattttcatatgttgacagaaaaaatattttttatactatcaattaattacaaactattttttatgtataaatactataaaactacatagtaatttattatttaaataatgtactcataaaaaaacacttttattgaacaaaactttaacctttaatttaagttgtatgttttatattcaaggcttcaagcatgaaaggaaaatagagagactgcaatcatttccaacatttaaacatcctaaacatatttatatattttcagcatttgaactaaaacccacttgcgtaccaaccacgacttcaacctttgacacccttcccaaaataaggtctaccgcaattggcagaacatcctctacatctttctgaactttcccgaaataccacagagaatggcatgtgtgagccttacttacataaatgctcaagcctcaagctattttctatttttgtggacaatggaaatttaaaaaacaaaagaaagaaaaaaagaagctagaatccccagcagcactgtcagctaacaaaagccaactctacaaaatcagggggaacatagaagatcatatctatggtttgcaaactcaaaccatgattagcaaaaaatcagaaacttgattaacatctcagggggaaaacatagaagatcatctctatggtttgaaaactcaaaccatgatttgcaaaaaatcagcaacttgatttgcctctcagtaagcatgagccaatgaaaccaaccgcagcagtcatcccaactgatgactgatgagacaccaaaatgatacaaggaggaaccacacacctctttgaaatgaggtttcaatctgctttagaatcaggctcaagccatcttgtgtagttcacaaggtgtaattggagcattgtcttcattgccagggttctgacaactgtcagatccatcttgaacttcagtagtaataggtgatctgccaacttttaacattctttcttcagtcttagtaaccctgccagcacatctaacctttccaacatgacattcttgaggaatcgaaggcagtgattgggatactgattttttactatcagtcatacataagccttccttaaaacaagaagttgcaattgaagcattgtcattattggaattctgtaaacagtcaaatccatctttaacaccagcaaagttgtcaccatcttttgacatttcttgtttagtattatttcctctgccagtacatacgatcttacctgtaaggcgttcttgacaaattgagtgcagtgagtttttacctgcagatgctgattttatactgttcatcacaagtaaaccttccttcataggatacgaagtttcaattggagctttttcattaccagagttctttaaatattcagatccatctttagaggaggagctgcaatcttttggcatttctttgtcagtattaataccttggccagcacatatgatcttatgcgcatgattctcttgacattgacaaattgaacgcaatgactctgtgttcagagacactgattttatactatccatcgaacataaacctttctgcacgtctttgcaagaagctgaagcaaaaacattctggtttatgttgtcgagacattttgatccatcattcaatgcagtaagagcactattgattgctttttctcctccttcaccgcagacatatcccctggcatgactactattcttatcttcagaatgtgttccatgaatgttttgtacttcggcatttgatttaacattaaatgcagtaagagcactatcagttgctctttctcctccttcaatgcaggcatatcccctggcatgactactcttctcctcagaatgtgtttcactaataatgtttcttacttcagcatcagctttaatgttctccgcagtttgaaccaaaacacagcagctttccttaacatccttaacattataacttccaagagatgatggtacttgtaagttttgagaagcaccgaggtcaatgcccttatcatcagaagttatactcttgccgaaatttgggcggatcaactttcttttcttttgctgcccaaacaccaaattctctttcttttcactctcattggagcttctgatctcattttcatcactaagtttcctcactttgctacgacgcttgaaatccacaaaacatgtctcttcagctgtttttttagtattgccttcagttgcagtagacaaatccatagtttgatcagtcagggtattttcaaagcaatcaccctccttcctcgggctactgatttgagttttatccttcagactttcagctttgttgtgcataggctttggctttctttttttcatccacttgctgtgactcagccgaaccctttccatcactgcatcaactgaagtatggaaatcataaacctcatttctcacattgtttccattttcttgtttgctatcctgcataaaagataatcgagaaaaaacactactctttttctttggatagccagaattattattttgagaaccacatccaatatcatattcatggattaacgaatcaccatctttgagatgaccctcatttgcccatgaaatatcaggagtatatgtgtcatagttcttcggtagtgttacgtcatgactcagtttttcttgcaaagttgtggaatgaaaattgttgcctaaccatgattggtgattatggaacacggaagaaaagggatcatgtagactgccgctcctttcaatatctggaggagggatagaaggtgataaggatggaatgtcgcaagcctcataaacaacagattctgcggccaactggtcagaattttgaaccgtgttgagaggtatgtaatccttgttgctactataaaaaacagaatttcgcaagtcacccccaacagtgtgccacctgctcgtgtctttcagttctttacgaatgagatatggttgactgctcaaggaatttcttccatagttgtttgaaggagaagtgctttccattattggcttagaaccatcattaattccagcagatgatacctggctaaaatttaaaccagaagcatctggatcatacagaagggagttactgttagaattagtatctctttggattacacctgtattgtttaagatctgtgactggattgggtgaatcattgtagaagttggcctaagccgattttgaacaagagaattatgctccaaaatatgcttgctgtaaaagccagatggattgacatcagaattatttaaaccaggaacatcatttgaaaataaaatcctctgatcagactctggtagggatttactcatgagcctatccctaattgataaccttccctcaccatgatttctaattttatcagatggacttatggagtatccacctatgatgtttggcctgagatagatatccatataatcctcattctcatatgcagcaaacctactttcatcctttaatcccaaataatcaccaacatactcacttgtagtatccaccaaaaactgagcagtccttccttgcttaatatcacttgcatttaatccagtatatttatattctccattgtacagcaaagaatctccttggcgattaggcattttgatggctgagatgctaccacccacatcttgtttattctgaagtctttcaatacacattccatgatcaacagatcttccaactttgcctaaagagtaccactctgatttcaagtcttcctttcgggacaacattctcccaggagaagcctccggttctagccttctctcactgaacaaatatagaagtttatgaacctacacaacagattgatataaaatattttagcaaatcatcctcattttgtttaaaaaactaatcatgtccaaccaagagcagacctgattttcagatagcccaaagttaaacttgttggttgtaaagtaattttctctgattgcatcacggaacaacttttcaggcaatggcttacagagccaaattgcatcgaacttaacctacaacatatcagtgcaaccataatatattaatctcaatgcaagaaaaatgcactcttgcactcagaatcaaaataaggctttgctcattcctgatgtgaagggaaatttataaaatgaagttagtgaattcttacctgagcaggaaattgcttccccactttcgcaaaggcatttggtactatattgatagctccatcacaggatgccttgaacacaccatgcagttgtctcttctcatattcaaataagaacaaaatcattccagttttaacctgctctacaaactggatatcagaagacgggaggccaaataatcccttcttgaagcattctctttttgtttcactatttgacataaagattgctccaaaatctgggtcttttccatatgcgttgttgttcttatcattgattcccatggagatatatttactaaactatacactgtcacatgagaaaataaacaacagggtttgcattgtgtaaaaatagtcacacgtatcaaattcctttcaagtttcaaatatcatcagtcagtatttagcaagttcaaatatcaaccacgaccgttaaattctacagtttaaaattacaatcaacaacacacaaaacctaggtctttttcatcatcattgttgtgcttatcgttgattcccacagggatatatttactattctacgctttcatgtgaaaaaataaacaacagggtttgcaattatgtaaatatagtcactcataaccaaggttttaaaaaatggtccacgaccgtgatttgggcagcaataccaagattttttaactgtccatcgcgtttgggaccacatttgtccgcaatttatcgcgatatcaacaaccacgaccgatatataaaaccttgcttataacaaatgtcttccaaacttcaaatatcaatcagtatttagcaagttcaaacatcaaccacaactattaaatcccacaggtaaaattacaatcaacaatacacaaacaacaacaaaaaaaaaaaacacgtccttaagaactgacacgcaatcgatttggtaacactaaaaggaaaacgaggcacattcgcttcaatcacaacgtaacataggttttctatccaattagattaatacagttcaaaccaaccagacctaaaatattacatccgcttttctaatttctagtttcaaaacaaatatatatatatatatatatatatgtgtgtgtgtgtgtgtctgtgtgtgtgtgtgtgtgtctgtgtgtgtgtaatctcattattatacaaacaacgactccgtagtatgatcgaaacaaaaacaactacgaagaatgtcgataaattcataatgaaaaacgataagacgaaaacatgacgaaaaaaacatagaacaaagcgccgaacgcgaaaaaaaaaaaaaaaaaaaaaaaaanaacatgacaaaaaaaacatagaacaaagcgccgaacgcgaaaaaataaaaaaacttagttggaacatcgcaatgatcaaaatgttatgatgaatagagaatgcgtcatgtaataaggaaaaggaaaaggaaaagtgagaacggaagagaagaagcgtaccgatgaagaagaagagagggtttgagagagtgagagagaaaagggaagaggcgagagaggcgcgattgtatagtgagtgatgtttttgtttataattttctcatatattttgcaagagtcgtgccactatcaaaccgttcttagggaaccgtaatctaagtggggccatttttaaaaataaaaataaaaaataaaaaaagggttgaaggataggtttcaacttcaaggatttcagtctgtgggtgacaagtggcaacaagaaacacatgacacgtggagcgtgtgggtatcccactatgatgggacgctctgatattatagagataaaaaaatttcgttcatattaattatattcgactaattttctctagtggagcataatgttgtctaaaataaaaactatccaataaataattcatgtacttttacatattttacacgatttttttctatatcaattacttgaagtgattagtgtgttgcttttagttagggaataccctatgtttaaaaaaagtataatttgattacaaatatatatattattttgttgatctatgtaaatgatatattttattggttcacaacataaatttattttgatttaacaattagcttaaaaatcactctttttttgtctttatctattttcttaacctttttggactattttgttatctttatttctaaattgagtttcaatattttttaaaatgaattatcaagtggtttaaaaaaattattcattactcactaaaaaaattaaccattaggatatgaattatcataaatgagtgttcaagaccctcaacaaaaattaattatcactttagataggactacttcctactaataccatgattaataaaaaaagaaacacaaattatgaattattaatcataaatctaaaatacagttatatgtgaaaaatatttatttatttattatgaatttaattataattaaaatttataataaataaatatttaaaattactgatattatagttgtttgtacatgttgattgttatttaaaattaccgatattattgttgttagtattacttaaataatttccagaacttagtttccggaaaaagaaaaaaaagatagttatgatgctatataaatgtgtaaaaatatagattataagggaaaaaatattcactacaaagaccgacatcatgacatgatcaagtataacatgttagtgtaaaagtgcatatcaatgtttaaaaaaagtgtatcaattaaactcttgtagaaaaataagaaataaaaacttttatagttattaattcatatttcaatgccacaagccttgctaacatgttatcattttttctgggcaaaggaggttgttttatcacaactcaagctgtttatctaccagtcatcctcattcaaaatttacaacatcgattgggggaagagaactttagcacctgagtaaacagatttagcatcatctgcacaagaaagacggaaaaaaaaggggtcataattgacaagaagatggcatgatcatggttgtagaaacactcaacaatcaataaactaaaccttacagaatcttaattcacaactgatgaggatacactattgaacaagagtacaacatatgactttgccatatcaaactcttcttgtttttggttagaccatgggatattcctacgtcgtttgagcatgaaactaatctgtgctatggctttagtcatgccatggtcactaggtgcttctagtaagtttcaaaaatcaaacttctgcgttgccactaaaactcactaacatataagataaactgagccacacgttgccattaactcgatttccaatttaatgtaccatgaggttacagattaattggttagcagttctgaacttctaatgtctaagtgcatgtttggttcaacttgttttagtcttttagagaaacaattggggtggggtttactacttagatgctttcagcagttatccactccgcacttggctacccagagtttaccgtgggcacgataactggcacaccagaggtgcgtccttcccggtcctctcgtactagggaaaggtcctctcaatgctctaacgcccacactggatatggactgaactgtctcacgaagttctgaacccagctcacgtaccactttaatgggcgaacagcccaacccttggaacatactacagccccaggtggcaaagagccgacatcgaggtgccaaaccttccggtcgatgtgagctcttggggaagatcagcctgttatccctagagtaacttttatccattgagcgactgcccttccactcggcaccgtcggatttattttccatctcctaagagagactttacacaataagtgattatttctaagaaattaatcttttccaggcatgcactaattctcgtgtcaagttctcaataatattatataatataacactattcgtgtgattctttgttatcaataagttaatctttggtacatggcaacattataggcttggtatgattcgaacttttgcaattcacatgagaattcacataaatacttattaggcttcggatgaattttccatttctcaaacactgattcaattccacatagaggctgccaaatctccaatcacaaaaataatagaaagtgagaaaaaaggaaccatttattaccagggatgctaattagttcactaactaacttcaaacatgcaacaaaaaaagcaactagacatgcatatgaccatggctaaaactaaatgcatagctaaaactttacctgtgatagcagataaactgaaagtagatgggacattagcctcaacctccactgcagctttagccactgcaatgccaacagccacactttgcataatatctaatcctgcacaaattgatgtgagtgttccaccaactaagcaatcaccagcgccagtaagcctcacaactgatgcaggaagtgagggaaaatgcacagcaaagagatgagagcttctatcaagttctgaaaaacaagaataacgactatgtggacatttttgcataacagtcttgtataattgtcctccgaagccacactgatttgttttctcagcaggcgttttaaattgtctaggccctcctttattgcataaaaacactccattagagccaaaggtcactaggaccactttaatgcctttttctagcaaaacccatatagctggtttcagcatttgaaacaaagataatactgaaatatttttcttctgactttctttaagtggatgaaactcatcactgccagataaagcatttgccatcgcaataagttcatcttcatttggagaagcaaaagttacctaaacaaagtatgcacaatttaacatatctaaaaaaatttatgatgttgtaaagcacgaatgatatcctatgattttggtaaagttaaatcacatacacattgcataatgtaatatatctaaaaaaatttagtgatgctagcagaagtttaaatttacacatataataacaatgttattaagataatgaatatcaagaattcaagacaacacaaggaaagttgctgacaagtgataccaaacaaactgtttacaactgcaacagattatgtaaataactaaatattgtaattagggatattatgagatgttgtgagctgtatgtatttatataaataaattagggaaactgttatccattgtatttatgacttatattataaacaagaacctctactttgtgtattagatacatagaattcaacctatgtatctcattctctctttctaaacaactatttcagactattgcaatgcccatttactcataaacacctttgatcaaaccatgaaattaatagatctaataaagaatatcatgtttgtgtaaagcatagcactcacatactcgacaatagaactgattcttcgggatttagtaactgatactggctcaaaccatacaggacactccatgtcaaccgccactgagaaacatagatatttatgcaaagggaaagaacaacatttgtagttagttcataatccaacagagagagggtaaaagagaattaaaatattagcatgcaatgtacttttacaagcagcttcaagagaaggatgactcagatttgcatcaaccattaacactggagcagatagtaaagtgtttttgaagcgaaagatccagtcaggtgtcagatatttttcctgcaacaatatgattgaattatatttctttttacttgcttacgtcttttataacagctttcattatataatatgtaaggttgcaaaatacatcttttagcttgcttaagtttggagattacttgatagcttaatacttgaatgttcaacttacaagagcttccacactagcaacaccagctgctacctcaccactaacatcaaatatattgcatactactggagtctcaatatctttatccttcaaaatacctacctcaaatttatcaatgtacaaaaaaaccattactttttacattttttatggcagaccgaatgatgacagccgcaaagacaaaatagtgtaccttctatagataggccagcagatttccactgattcaacagcagatttcctagaaaataaaaaataaagagaataaaggaagagttttgtaagtttcttctctagatttattctccaaatgccattctgatcaaagtgttttctgatactcacacaagtcattaacaaagaatcaactgtagaatattcttagctgattggcatgacatgcatatcagttcacatccttagaacgacatattattcagaaaattatagatttggtatacttataatttgttaattataggaataagtgtagaatgaagatactaatgaagtgtagaaagtctaatattgtaatcagggatctaattatccttagatatgttcagcccaatgatcattttctatgtatttaactggttaattaagtgtagaaagtctaatattgtaatcagggatctaagtaattaaagatagtctaaatggtcaatcaaagcatcaaacacaataattaagccaccaaggggtccagtcaaatctagaatattactggagtttattagtaggagttttcaagtgcttttgatcagattaatgaagtattattgggtaaaaccaaactgcatctatttcatatagaagggcactgtttatttctaggattggatttcttaagccttattattagatttccatccaagaactatttccaatccagcaatcctatacactttcctctcatttctaggatggcatagtttcttcagaaaattattttataacattttttgtttaaagaaaagcaacactacattagtgcgttagtctctaagtaggacagaaacatacatccaaattttgataaatgaatcagagaaatgtctccacttcgaacaactgacaaatttgaatataaaccagtcgaagttgccatgaagggttcctcttgaccataataaatgctcaaagtaaaaaaaataaaaataaaaaaaaaacatatatatatatatatgacagcaatgcgagagaaaatgtttgtgatagtaacaattaccggccatgtcaaacccaagagcactaatcatgtatggctttgctcctagttttgacatgcactctnnnnnnnnnnnnnnnnnnnnnnnnnnnnnnnnnnnnnnnnnnnnnnnnnnnnnnnnnnnnnnnnnnnnnnnnnnnnnnnnnnnnnnnnnnnnnnnnnnnnnnnnnnnnnnnnnnnnnnnnaaaaaaaaaaaaaaaaaaaaaaaaaaaaaaaaaaaaaaaaaacatatatatatatatatatatgacagcaatgcgagagaaaatgtttgtgatagtaacaattacctgccatgtcaaacccaagagcactaatcatgtatggctttgctcctagttttgacatgcactctgctacattccttgccacacctccttggacataatagacctgacaattctccagtataagaatgagaaagcaaaagggaataataaagaatttccaatcatggcaatgaatgaatgactgcttatggtttttacatcattaacaaagattgagctaaccaatgcctgttgttggtctgagtggcaaggaacttagttcctcttaaccagagttgggttcagtcttttccccttgctcaaagtaactttccaaatatcaaaagtttcagacccatggaagaaaaatatagtgcaggcatcatcctttcatttagattgaatatactttgattactaaccttaccaggggtagtggttccaggatttgctagcattgaaggtgtagcatgaatgtccaataccatacccccaattatcaccgcttctccatccccatgctccatttttttttacctctttccgcaaccttaccacccaacaacaacaacaaataaccatcaaataaatttgcataatatgcaataacaatagtaaagaaaaaagagagattaataaaaaaaaactagcggggataaacaaatattagcatagaaagagtttgcaggagatgcatcacagtattattagtttcacgaacccgagttcttcccttaatgctaccctcctttcctgttactgtttttttttcctttctcaaatcccacgctggcaaagaaccaatcaagtagcaaatagctatccgatcgttgcaatgctatataaatccaatgaaaaagaagtgaagggaacaggacaaaatactaggtgtttgttcaggtaatggatgagtcaatagatgagagagaagcaggaaataagcctttgagaaattgtgtagatcaaaactacaaataacttttttttttttgtttttataaggttaaattaatttttttctctaatttattattaagagattaaatttgattttttatttttatcaaattaaatttgatcttctaagatttaagacttaatttcataattaaattagtattgttaaaaaatatgtattttgtgatagattaaaattatttaatgataattttaaataatgacaaaatgtgatattttttaaaagttaaaagataaattaaatcctaaaaatttagaggaggaatttgaatctaattagaaaaaataaataaatacagtaaaagactaaaaatagaagaaaaaaaatagtacttagaggtggtaaaactcaaatttaaccctatgaaccctacgaaaattattggcaaatagaaaggtctgttgagaagaagcagagtgagtgttagagagagagagagatggcttgcagacagttgtgggcttcaagagctgcttcctacctcaggatctccgtgtttcacagaagcttctctaacggtattctcctccttcctctttttcttcttcttctttctatgatacgtttttttcttttcctttgctttgtttcattgatcatttccgctgcttttgtcgtcacgtcatgtgcgtggcgtggacgaaacatgcggatcgatcttgatccatgcctttcaatgtgtcatttcaagttccgttgcgtttcttcttcttgatggcaaaactcacgttttggtgctttctgatgtacaatgtactgcatggtgattaccatatatatatatatatatatatatatatatatatatatatattagtgtggattcagctgtgtctggtgatctctcaggttatgttgcaactgatcaaggttttaaatatcggtcttttttggtcacgttgcggtttcgtcgcgtatgtttgttgatatcgcggataaatgcggccgatgtggtcccaattgtggtcgtactgtcgcagacggttaaaaaaccttgatgttgtggctcaaatcacggtcgtggaccatttttttaaaatcttgcaattgatgaaaaggaaatggaatgaatcaaaatgaaatgacattagttgtctctgtttatattgttttaattaggatggaattgaataaacgatttgttcaattgaacatgaatgaccataggaacatagattcacattggaagttcattggaaagtgcaaatagaggctcaaacacacactaattgtttgctaatttttcttaatccttcggcttaccgcatagtagttggaaaattctactgtattccattgtaaaatgttcaaaagaatgggagaagaattttatttcattccatcttgttctattttaattccgcccgtagttagatatccatacatagtcatatttgttgtggtcattttaatgggaaggaaagaaacagaatatgataataatagaatgcttctgttgttgaatgttgaatgacaacaaattaaaggagagatgtttacctttctcaaaatagtttataaatgctaaaaatttgaatgattcccccttcttaccctcctactatttaagctaagtccctgcccttctgctaaaacaacctaactacttccataactactttctaaccaaagacataacttataactatatgtaactacttctattatttcctaaactccaaagtccaatgagaaacaatgattttaggtggttactggtgtatcttaggaaggaaccagttctggcatcagcaatgtcctatttccaaaatccatatttccacctctgaatggctgcattctgaaagtaatgaacagtgcaaaaagagaaaaagtaatggcacattattactactctttctataaattatgtttgatatttatgttgtgaatatttgtgtaggctaagtctattgaagaacttgtttgcttaggatttgtcagaatttaggttatgttataggttacaattgtcgtaatgactctataattaaaagaaagaaagataagttgtaatttattctttcttgtgtcaagggtacagtttgccaatataattggataaagttagtactgaaagatggtgcaatcacgcagttagattgtgtaaagtatgcatactgtttttttcttcaatgaacttcatatcctcttgacagaataaagaaaatcaataaattgtagttgtgttctagttgcatttaaaatttgcatatattatgttttttaacatttaagtctgcgagttataatatccctgacattgtgccatcagtgttataacttattagaatgtcaatcattgtgacaccacttatagagtgagttttgacacaatgataaggtggtttaccttccaagttgtgacttagtcataggttcctgtgtctgaaacagctactctaatcaggggataaagtgataaaagatttcatttttattaacttctttacaagtcaaccatgcccccacctcatttctgcattgctgcttcctatcccaaaagagacctcagattctactcatttctcgttctgtactgtttttcttttttatttaataattatgggtatgatttaatcatatctcaatttacatttgtttgatacaatctccattttccaaaaaactaattatctatttttactttgataagaactgtaccgtcatcagtttatgcttttcctgaacagtttgagtaaagtttcttactttatcttcacttcgtttttttcctttcggatatgggctttagtatgctcattgaaagtgtgaatcccagttttcaatggtgaaactattttttcaataatgaaacttcacaatgcttcagagaaaaaaaatcttctgttagttttggtgtgttatgtatatcaaattttgttggagaattacttttcttttttttggggggggtggtgttactcttcttaatggctgagtattctgctattatttggttgctctgtgttttctctttcttttgctgcaaccagtcagattcttcttctaataacttggctgatcagattccaatattttatttatttgttgggtgatttagcaagaaagtcaattaatggtttttgggccaaatatggcctccctttgttacacctacagttttgaatgatctgaagtatgctgattctcatgagtgggtgaaggttgatggaaattcggcaactgttggcataactgatcatgcccaagatcatttgggtgaggttgtgtatgttgaattgcctgaagtgggagccaccgtgacacaaggagaaggttttggtgcagctgaaagtgtgaaggcaactagtgatattaactctcctgtttcgggaaaagtggtcgaagttaatgaaaaacttaccagttctcctgctttggtgagtagtattgttgcctaattcctaaaagaggtttttacatgaaaggcaagatctgaatgaatgcctagtgtatgtgaactttaaatgtttttgcttctttcagtactttctttgtacactctgatctaacttttgaatcaccaggcctatgtgatgctgaagtattgcaatgttttcttctttttatcaaccccaagtatttttcatcttgtcctacatttcttcatacaggtcaacacaagcccttacaaagatggatggataattaaagtggagatgagtgacagtggtgaactaaacaacttgatggattcagaaaagtactccaagttctgtgaagaagaagattccaaacattgatagccttgccaagtgcttttagtactcttaatgatgttgatcatgttcgttagggaagctaaaaattgcttgatttctcctcctttcgttcatgtgtcttgaatatatttttgtttctcgtgagcttcaaattcaacgggctaataattttcactctttgccttagaaatatgaaattaaaaatgtgggaaatctttttttttttttaaagaagttggttaggaacaagatgaatgaatcatttccccttagcctcaaatttatttaactcactaattcctaaatcatatccaaactatcttaactaacacgcttttttccatagtcttaaaaaaaagaaaattatttatgtatgaaaatgtgttgaaagcatctggaaattaatttttagaacatttacctcttgacagaaatatattttagaaatttgttttaaaaaaaggaaaatataaaataaacgaaaattgtatatttaactattcacatgtgaatttaataattgcctcaacatattttggccctcttaaaatatatattgtcatcctcagattctcaccaactacggggacccaccattcttcaccctatggccctatggccctatgggtctctgttctgcccatgttggtactgtttaggattccttcggccaaaaaaatttaacataattcggccttaccaaacannnnnnnnnnnnnnnnnnnnnnnnnnnnnnnnnnnnnnnnnnnnnnnnnnnnnnnnnnnnnnnnnnnnnnnnnnnaaaaaaaaaaaaaaaaaaaaaaaagtaacaataacagaaaaatatccgttcagtttttctatattatatatgaatataacatcattaagaagtattccgtatatttgtttgattattataaatatatgtaaaatgtgaaactttataaactttaaaatcattttgacaaaaaaacctattaatactaaaaatacaaattaaaatataagtatttaaaatttacaattcacaaaaaattaaaaatatttttaatgatagtatttacatgtaaatatgttttatacttaatattaattaataaacttacattttgattaaaataactaaaaataaaattattttattgaataattaatttaaaatctaatttgatataaaagtttacaaaatgcatgtcataaaataaaaatatataattgtataagaaagaaaaattatatataaagtattgcattgaagactcaatcaatcgatttgattgtgactcattaaacaataatgaaaacagaaagaataattttttttgtattaaaaaagatgaaatattttttcaaactaagaataaatattcttgaaggaataaaaaaagaacaaaaactttcaccaactccctcaatataaataaatgaatgttcagcatgaccacagcacaagtggagagagaaatggcttgcaggcaattgtgggcttcaagagctgcctcttacctgaggatctctgtgcttcacagatgcttttctaacggtagcatctcattctccttcatcctcttcttctctttgtgatctgcttttcatatgttttgtttaattcattaatcacttacaattgagttgttgtcatgtcatgtcatgtgttatgttgtggatcttgttcgatgtaattcaatgtttcatattaaatctcatgtctcttctcttctgaatgggaaattcacatttcttcttatgttttctgatgtataatatggcatcatagtgctaacatatagtgtggtttccgccatgaatagagatctctcttaggctttgtttgggagttaggaggggagggaaaggaaagagattcaaggggaagggatggaaaggaaagggaggaaaataagggaagttcctttatccttgtttgggagttaaaaatatatcaagagagggaaatagagagttaataagaaatttttacaatttttcattatttaaaaaattaatacattatatattttacattggttatggtaggatagtaattttattaacactgatgatataagataataattttagttacttttccttctaaaaaccccccaaataggggggacaacaatttataagctttggaggatttcagaggagttttgaaaatcctcaaatcctttccctcaaaaattaaaactcgcaaacaagggaatgactctccctaaacctttcctttccctcccttcccctcctaactccctctcccaaacatacccttagtgtcttggtcttgttgatattgctttccacctttacattatctatattttaatggcagggagctttctaagcggtggtgggaagggaaagtgcatcacccagtcacccacccaccaacaaaataacgttaaaaatgccctgtgcccaattttttatgattagtttttagcaaatgctaggaagttaaactagaaaagtttttatttgggatgctactacccataatatttttttacattctcttattattttcacaataaatactttattttttaacttcttaatcagtacactcactaattagtaagacccttagttttgtttttacctttattagttttccacattcttaatggcatgtaatatctgtggcctacttaatgggctgcattctggacctagtggaccttattggcccaattagtttcatcaatcaagcaggagaatgacaaaagtggagctggtaatggatagtgatagaagggggaaaaaaagatattttttgaatactaaatgtatataagaaaccaggataaattccaaaattaaaattgaaaatatttcatgtttgtatacattttcagagagtttgttaccgaaagtttgaatcttgggttgtacctatgctgttgtttgttacattttcaatgttgaagctttagtattactacatcagagcaaaaggctgtttctcgttttctagtgcatatttggaaatttggtgtagaattacttttaggtgttttggtcttttatagcaaattttacatcaaataaactattacttttcattgcattttttacataacttttatcaattgcttctcattgagggtttttttttgcctaacttaatacaaacaatactcattatcctaattggctgggtaaacattacttaacagttaacacacaactcattgcttcgaggtaatttttccaaattagattccgctcaaaagtaattctcctccttgaaaccaaacaaaccctttagtattccactatctactatccagatctgatgggatcttgaagttgcttaaattctattctttcctgaactaatattatttaggtacattacattggagctttatatgttaaaatttatgtaaaatcaaactcgtggatcatcaatatcattgtttgcttgtaaacattttggaaaagaagtaaacaaaattgcaatttgtaggaggaaaattatctttgtatgagcttgcctgattgaaaatgcctcctgtgtgcctgtttagttttatatcttgaatttaaacatcttgtgggttttggtgattttctgattcattccatattcacatctccaattatatgctaaatgtaaatgtccatctgaacatgtagaatatgaaaatgattattttgtagttgttgcaactaacatttctgaagttaatctacataatggcttcaaaatgtgaaaagaacactttgcttaaagagattaagttcgttgacttttagttgtccctctaacatgccttcttggcttcttctatgttgtacctccagttattaaagatttcaagtatgctgattctcatgagtgggtgaaagttgatggaaattccgcaaccatcggcataactgatcatgcccaagatcatttgggtgatgttgtatatgttgaattgccagaagtgggagcagctgtgacacaaggaggtagttttggtgcagttgaaagtgtgaaggctactagtgatattaactctcctgtttccggaaaagttgttgaagtcaatgaagcgcttaacagctcacctgctttggtgagttttattacctcattctcaaatactcgctctgtcccaaaattctaaattgactgatgtactcacttttcaatgagacattaaaacatctattccaattttgccctgtaataaataatgttgttgaggaagacttaataatacatttattgaaattaagagagagaacatggatatttaagtaaaattattctctaataaatgttcattctcttggaattcttactttattggcttgtgtgaaaaaatcctaaacatcaatcattatgggacagagggaataactttttacatgaaggacaagatgtgtatgctgagtttatgtgtattaactattttttctcctctgtgtatcatgtagtttttacatgctacattttggattactatgcctatgtaatgctgaaagtattgcgataaattcttttttttttttttatcaacacctagtgttttcatgttgtcctacctttcttcacacaggttaattcaagcccttataaagatggatggatagttaaagttgaaataaatgacagtggtgaactaaacaacttgatggattcagaacaatactccaagttctgtgaagaagaagattccaagcactgatggtcttgccgagatctttcagcactcttcaatctccatggtgtagatcatgttttaattgggaaagctaaattgcttattcctttttctccttgtgtcatggcttgaccagtgctctatttttatttttcataagcttctaaattagtgggatgatatttttcactctttgcaatagaaaactgaaattgataaagtggtaaagggatgatgatgatgatgatgatgatgatgatgatgatgatgatgatgatgatgatgatgatgatgatgatgatgatgatgatgacgacgacgacgacgacgacgacgacgacgacgacgacgacgacgacgacgacgacgacgacgacttctagttttcttttaaagttaagctatttttgttagatgacgtctataatagtttgataaataagatggaccgtagttatcaagaattgagatatcaagtttccatattctttacacaagatagacatcatttgcgtatattgcatataacaaattattcttattgctacagttggtcactaaactccgtggattctaagcaatttcttcgatgatcatgtagacgtctcgttcctaaaaatttcagaaagaatataatgggaaaaaaacatgtctatatgatgtaaaaaaaataatataaatttacttatgacgctaaactatgagtttaattgatgaaatcattctgaagtccgtgctacgtttttcacatcagccactagtcaatttttggtgccatgtaagtctcgtctttcacgcgtcaaatccacctattgtgcgccatattcattcatttctggatactctaagtctaatcatatggtgtctccataatggtagtgcaaagcgtgcaaaaaaaaacattactggcatgagccattgatgattaattgtatacggaaagcatattttgctgaaaggtaacatctttatgaaatgaaggatccatcctgtgaaagaaattaaaggctcaacaaccctgtttttttaaagtagaataatgcaatattattcagcttaagaggataaatgcagtacatcagcagctaaaagaggttccaattggtaaaaaacatggcgatataaaaatacaagtcatggaaggtttctgttaatgtaagaagtatatagtattacgtcattatattgagggagggttgtaaaggttaaaaatgggaagggcatcatgtataggtgtaactttgttgaatcttagaggatgttaatgtaatttgccctcataataattatttggaatacttatatgcattaaagggtcataatgctatctgcatttgtgtccatatcatatcaaggtactcaaattacattggcaaaaaaaagtggatctgtagcacacatcctgctataaattacaaagcgagactgtcttgatcacgaagttgaggtataacaaacagattttagcacctcatattccattaagtgtgacaacaattcttcgtggggtaggataatcccgatgttcgcagagccatatacccttgaacataaaagaagaaataaattattattaactcggatgttacattataccaaactgaatgcagtgcgaacatctgcaaagagtaactaaatagttattcaagtcaaccaaaccaactccttttatcacagatccaattataaaatattgtaaaccaacatcaatgatagatattaaacactatcatattaaaattgtatttttcaatttataaagattaattttattgaagaaaaccccagtacacaatatatgaaatttcatactttatttcctcaaaacctacatagcatagatggttcatattcaactcctatgaaaatcagtttttcatctgttcttaaaagtaagaatgaatggcattgccttgttagttgcacacggtcaagatctataattttgtctatccttgttaaattttactgataaaccctatggttttatacatgaaactagtctcaagttcaggcatcatgaacggcagtattgcgagattttaaatttgttcgtgaaataataggtttatcctaatcagaaatagtgtattatgtatcaatcactatgaaatatatatatatatatatatatatatatatatatatctccatcaattccccggtatatggcatcactagtgaattactggagagtggagacaggtgttatctgtggcagatggcagaatatagcggaagaccgaaattccaccatataaacacacattgcggcctatgacaccggcataacacaccttcacaaattgtctatggcagtcagcaaaaattcatccatttaacagcattgctggagacaactacttttagaacactatgacaatggaagcattgattcaactccttgaatgtgcctgtacataaaataaacataggtagctgctgacttttcatgcaaggccgtgaatcttttaagaattgctcagcaacgggagtgttcatggatggattcaacaaaattccaaaagtgcaatgaaaattaattcgttatcccagagctctttatccctgcacttaaaaggagtcccccaccccctccagtctctacatatatgtgtgcttgtgtgcatgtagtaacaatatagatattaataaagatcatttttgatagatcattgcaaagatgaattttattacctgccatgtccccatgttaagcttcccatttgtaatcggtaccctaaaaaagtaaaaatacaagatgtaagttgatgataacataaccataagttttcagcatgatgaataaaactgaaagatggaagtatttctcacgtgagtgtacaaccaaacatcgatgatttaatatgagctggcatgtcatctggtcctacaaaatttcaaatccaaatcgtctccatttgtcaaagatgcaaagtataaccaacaacttagtcatgatgttatgagttataaaaaatacaagcacagacaaatatattagcacacaatctccaattcgaatttcagcagctaaaaggaacatgttcaggtgagaggataagaatggactataaaatccatctaatcacagaggctttctggtgaatatataaagtattataacgagtcaaaaacagaatcacattattgaagctagatcagctccatttcattaaaaaattaagaaaatgataacaaattgagaaaaaaaaaaactacgtactacaatgtccggaggctccacgttatgcgtaagggaaagggatattgtatgcagccttacctttgcatatgcaaggagactgttttcatatttgaacccatgaccaacacataactttagtgttgtgtcnnnnnnnnnnnnnnnnnnnnnnnnnnnnnnnnaaaaaaaaaaaaaaaaaaaaaaaaagactaagtactaaccctctagagtatgcttccatggagcagatgacccctgcacaagacattaacacacaaaaaacttgatataaagacatgttttgactatagaacagtaatcaatgcatcaaattagtgatagaaagaaagaaacctcaggaactatccgattgaggaaggtttcagtatcatcgcgaacatcggagtcgtaattctcattgatggtaagagaagcactggtgtgctgcactgtcgttttaatttcacatcataatttccaaatttaaaaccttgttatgcgtatagtgtatagtatagtatactcacagaagagatgagctaggccacacttgaagccagagaggtcttgctcgatttctttcactatctgatttggaccaaatcatcccaacataaatggttagggttttgcaaaaaatattataaaaagaaaagagagagaggaggaaatggaaatgggaccttggaagtgacgagatgacagccgcggcggagagggggcaagctgacggttttttgggcccacttggggatggtggactcggcggcggccatggagtctttcttcacggttgggtggtgctgcgcccttacgccaataggaaacttggctacacagaacgtcgtcgcttgcatgcttttggtgtttcccagtgttaaccaaaacaaacgactagtgggttatgcaacagccaacagtaccagcctgaatgaaccgggagctgcctattggcattggcactgcccaggtggatgggtttttacgtaattccaaaattactcttcccacaaaaatatgatttctatatattggcaatgttttttcagttgcacacatgggttaaaagcactcgtgcaattcgtgttcatggatcggattcagatcgacttggatatgatacaaacacaaataggtttaatttgaacacaacatgattaacaattcatgttataaaattcaacccgaacataacccgtagagtacacaggttgacacgatacaacttgaatttgagtacaacttgttttaaaaacaaaatgatattaattcaaatcacatttaatttgtttaatataattcaaataaaaataagttacatttaacttcatcaatgcaatatgaaaacataattaaatgtaatatacaacaaatgtctcattcttatattaacttcttccaccaaaatacacattaaaatcacaaatccacaattatgttctgattgaaatataaaagtcattgaccaatttattaaacgggtcagcgggttaactggttaacatgtaactcgacacgatttttttcatgttaaattttttcaatccgaacatgacccatttattaaacgggttgacccgaacatgaaaaaatcatgtcgggtctgggtctgggtgacgggtcgtgtcacgaattgtcacacctagttaaaaaatgactattttcatatagtgataaaattgtgttttagtgacttattggtcatgaatttgaatccaaaaatagtctctttgtataggtaaaagtaagactgcgtacaatatttcttcctaatatgatataattttttacacatggggtaaaaaaataagtagagcaacgaaaatacaatttgattataaagtgtataacaaaaatcgtgtttaaattgtttatttgagaatgaaaaaataaagcaatgaaaatattatattaataaaatcatatatttttattgctctatttttttcacccaaagtaaataacagacaaataattgcattgtataataatttacagaatcatattttctttctttaatttaagttaatttaataatactaaaatggaaaatatgcgaaccattattatactagtgtaataagaaagggagatatgtttaacaattgacccttttaaattctctgtgatcagataaatgctactatgaacgacttttataaattgtggtacttaatattaattaattgttaaatttggaaataatataagttaatgtagtattttcataaaaaattattgaataaataacattataataataacaataattatgtttatagatttcctaaaataatattgatagcccagtcaaaaaaaaaatattgataataaaatttatattgcttatataaaactttcaaatctttaaaaaaatgacaatttcctacctatatttcatagaacatttttttttctgtctaaatagtgtggcaaagagtcacacacaccaatcaattaaaattcatcataagagttaataacaaatcatcatccatgaaaggagttaataacaaatcaattaaaatcaagaattaaatcaaaatagttaacatgagatgacaaagataagccatatttggcaaaagaattggtcaatttgctagtttatctacaaatatgccctataaagcactacgaaactgaagcttcactccaatgatctcatcaagaagctcaccaaactagcttccttaatgaacaacatcatccaatagttgaatagcctcaaggcaatcagactcaactatcaaactttctaccttcaaatacaatgtcatcttcatatacatgaaagattattcgtagcttagtttctaagatatggcaatggccaagtcttctagaaaaagcttagataaattttccatcgttattgcgaatgacaattccacaagatgcaaaatatgtagcatgaacataagaaccatcaaaattaagttcaaagaattttcgaatatgatttgttcaactagcagacatatcacgagatgaaaaagagtagataggcatgaaaatattgtgacttccatattcctaaattgttatgtttggataaagacttttaaaaaattaaaaaatttaaaatgctagaatctgaattgctttaatttataattatttcatttttaattattttacttggataaattaatttaaatttcttaaacttttaatttagtttagataggacaattcattcttcactatatataaaatctaattttattttgtctagtttaaaaagtgttttctattttctttttaattcttaacttaggttataaaaatatttctttatttttatctgattttcactataaaatatattacaatggctcgcccaaacgacatcgcaaacaagatcgttgtgcgacgattttggtttacgacatccatcagtaacgcaaaaccgccggtgcagacgagtctgcgacggcggagacagcgtagcccgcggtggctgtttcagtcagcgaaggcgagagcctccacttttcaatccgtacatacaaaaaactccttgaagaacaagaagaagtgagcttccacttttttcaaactgtctcgcacgatacatcatgagcagccacgtgtctctatcctcctcgctcttcttcttccttcccaataacaaaaacccttccttttcatcattctcagtaagtataagtatctttgcttttgctctctcactctcctccaagtttctgacttcactacgctgtttttgttgttgcagccttttcgttggaaccaaacggtgacatttggggttcgcaaaacgccgcgttttgtggtgtgtgctggccctaagaagatattatttggcaaggagtgcagagaagccttacaagctgggattgataaactcgctgatgctgtctctctcaccgttggacccaaaggtgtgtgtatatatatatcactatggactatgcttagcaatttgattattaaccacaccattgttattgtgtttttttaatttgttgcattgcttaattgctatcatattcagttgcatttctgcctcaacaatggccagtatctagaatctctatctgcatttgattaagtgtgtgtttgggtgagcccttgcaaaattggtttttaatgaaattgattttgaagtaaaatgatttatgtttggacgtttttgtctcgaagtaagttagcagtaaagctcaacttaatatttttttaatccaacataaaagctacttggaatcgactttagacccaaaaatcattttctcaatgtgggaccaaacacgtgaacatatttgaattcatgttggattatccaaaagtcatgttcaaattccagctaatatgatttttggtaagtgttcacatgcttgagaaattacatcgggtccaaatcgattgagctgaagaaacttttggtaagttgtgctgtataaatttttttctattgtttactgctaacttgcttttagaattaaaacattaaacatctgaacataaattacttcacctcaagatcaatttcatttggaattaattttgcaaccgtgcacccaaatacacaaaaaattaactaaatgcatgttagctggtattttaacatgattttggatgatccaatatgagcccaaacatgcactgagtgcattttttgttttgattgggctttggtttgattgtaagctgttttgtgcataacgtaagctaatttgaagaaacactaaaagcctcacaattgctttgttgagaatcataataggatcagtatcagattttgtctttattatcaaatcagaattataggaacaatatctcctataattaattgtattgattgtaattaatctatataaagaggcaccactatgtaattcagaaacacggtttcagtcaaatacctctgttctatctttcttaacatgctttaaattatatttgagctggaaattccttgcttttgaatctcaatattattatatagtcattggttgattctggtccagtgtttgttgacttttctttcttacttgtttcattcctaaccatgcaggacgaaatgttattctttctgaatctggaaaccttaaagtgattaatgatggcgttacaattgctcgatccattgagctttcggatgcaattgagaatgcaggtgccatcctaattcaagaggttgatcatggttgttaggattttgcctcgggttaaatggataaaatttgagacaatagtaaccagagatgcatttatgttattagttttcctccttgtaggttgcaagcaaaatgaatgagttggctggtgatggtactagcactgcaattattttagctcgggccatgattaagtctggactactggcagttacttgtggggctaatcctatttctttgaagaaggggatggaaaagactgtaaaggagctgatcaaattcttgaaggagagaagtgttcctgttgaaggaagggaacatattaaaggtctttgcttctgtttgtttgaattttgtcaaattaaggggttttcttcacaagaaaatattgaagatatcttccttctcttttgcagctgtagcatcgatttctgctggaaatgacgagtatgttggtaacttgattgctgaagctatggagaagattggttcagatggggtgatctctattgagtcttcctcatcatctgaaacctttgtgataattgaagaagggatgacggtagggataatgttgaaattgtgggggggttaggtgtagaggaaagagattacgagaaaagacactttgaataataatattttgagtactataatgtttacaatgtgatattatgttcatgtaacctagacctagagcactacttataatcctaactaaatcaatcctaagggaaactaatcttaaaggatagtctaagaaagatgctcgaaaatatgataagatatctttatatattctaacagataatattactcaataaccaacatcagtttttcttgctcatatctgaataatccttgtgttttgccctttacagttgtgtttgtcctttttgacagttcgataagggttacatgtctcctcacttcattacaaaccaggagaagtccattgtagagtttgactgggttaaagttttggtaactgatcaaaagatttcaaatgtcaaagaaatagttcctttgctggaaaaggctatgcagttgagtgccccactcttaattattgcagaggatatcacaaagcaagtgttggagaccttagtggtgaacaaaatgcaaggattactaagagttgcagttgtaaaatgtccaggatttggaggtgcaaagaaagctttgttacaagatattgcacttatgaccggtgagttcctacttcctacagaatttgataatctcggttgatatttctgccaacttcctcttatacttcctatttttgaattctttttgtgaagcctatgcaatttgtttgagacaagaaacttttctgtcattgctttttgttttcatttattaatttgttttagttaagcagtttgactgcattgggcactaatgtgattgtaccttgtcattaatatttgcccaggtcttgctgtcaaaatttgcaatcaaccttgtgtgatgtttcaggtcctcagttgactgttaatacttaatagaaataattattgataaagacttgaattacatatgggggatgttaaattttggagttgtttttttttgtgcattgcatgtgactatctgtatgacagtatgaggacactatgaaattctgattttgttttcttaaatataaccaggatgtatttttgttgttcccatatgtcagaaacagtcttctatctagccttgtttaagatcagcacactttttctgttcttcttgtttgacctcatgttgacattaacaccacaggagctgattttctttctggagacttgggtctcacacttgattgtgccacatcagaccagcttggcactgcactgaaagtgagaattaccagtaatgagacaactatcattgctgatcctagtttgaaggctgaaattcaagctagaatttcacagataaagaaggatcttagtgaaacagataatgcaaacctgtcaagaaagctctcagagagaattgcaaaactctctggtggtgtagctgttataaaggtacctaattcaataaacatgtcaggggctgtctgtagtctggcagcctttgttctttactttgctaatgttactttagcatctcttactctgttgtcccgacttgagattttatatattattgggttttactggatcatagtgttattcaccgtgtatttcttgcttttaacatgacttgagaaatggattgttgatagtttgtcacctactagccttcttgatatgttatcttgtcaaaagtgagatcctacaaattttttcactaatcacttctatatcattcatgttatatttatcataatatatcatctatttgttgcttatcttctctgcaataatttttcttctactttttaatttccttttttcagtgaaaccaattattacaataatatctatatcattcatttaactaatgactcaaaatagccctttgattgtctaataactcaaatcagaattgtggtcgttctatttttatccctatcaattgttgtagtgttctgaattctatgagattgagtcttgcaaaaaatgaaatatgatataaatctaaattctagatctcacaccacgtcagttcccgcataacattcttgtttgaggttgagccttgacacatcagtaaggttggtgccttgtgacttggaacaagtttaattgtggaaacaaactctttgtttgtggtgggagcctcatgcattgggttgcccttttattcataatatttgtgtgaggatttcaaaaaaaaaaaaaaaaaacatcagtaaaaatagattttgaattgatttctttgttttcttagttatagggctttgttcaccattaatgttggaaagtctcacatcagctacctcaagatatatctattgggcaatttcacttaatgtcaattggtttaagatgaattctaacatggtattacctcaattagtagtctgcagttcatgtacctagtgggtaatttcagtcaatgccaattggttcttgttacaacatgggtttgggtctaactcaactcacaaaatcggtttttaaggtgagaattgttccccacttatatactctatttcggcactatctctagccaaagtgggacttcaacatgaaccacagctacccaccacaatgtgggacttcatcacacccctctttgctcacagctacctaggggtgagtacaattaaggtggctttccaacactctccctcattctcaaggctacccgcctagagcgtgagaaacacaaggaccccccaatgcatttaggatagactctgataccatagtagcaatacgaacttgaatagccagttgcatcagggtccttatttttgttggatgcaaaatcacccttgtttgtccaactcacaatatcaacttctgtgtcctcaaagactttggagggttaatttgttcatccagaaagttctccaccttaatgatgggcttttcatagtgatccatgttactcaaacccttctattgcacctcctcctgccttgatgcaacccttttaaagtagggatataaggttgtatttcaaaaactttaattcaagctaagttatgcaccacatccttaggtccaactcacaatatcaacttctcacaagagtgaaaacttagctccatttaaagtttttgaaatacaaccttatgtccctactttaaaaggattgcatcaaggtaggaagaggtgcaatagaagggtttgactaacatgggtcactgtgagaagcccatcattaaggtggagcgctttttggatgaacaaattaaccctccaaagtctttgacgacacaggagttgatattgtgagttggacatacaagggcgattttgcatccaacaaaaatgaggaccttgatgcaactgactattcgagttcgtttgctaatatgatatcagagcctatcctagatgtattggtaggtccttgtgtttatcatgctctaggtgggtagccttgagcgtgagtgttggaaaaccaccttaattgtgttcacccctaggtagctatgtgttgaagtccccacattggctagagatagagtatataagtggggaacaatcatcaccttacaagccgattttgtagggttgagttaggcccacattttaacagttttaaatgaaaactaacaattagcttggatcctataaaagaagtgaagtatctactacatgatccttgtatagattatgcatgagacctagtaggccatcgtgttaattgcacagatcttactgactttcatttgttttccatgttcacaattttttattgcaattcgttgtacaaatagaaacaactctcttaaattttgtccacaatatgttacattattttcattctcatgtgtttattacataatgcaataaccaattgtgtaggtaggtgcacatactgagctagaactcgaagataggaaacttagaattgaggatgcaaagaatgcaacatttgctgccataagcgagggagttgttcctggagggggtgccacatatgtccatctattggacttgataccaacaataaggaactccatggaagatctagatgagaaaattggtgctgatattgttgcaaaggtgtggtacattttttaccatactagttctctttcttatcttcatatatttcttctcctattgattttactttgtagtgaatgttctaagattattttcatgtaaaatatttctttccatgaaaaaaattaaattagtagagtgttgacttatgagatttgcatcttttgaaatccaagatttttgcgagttttcttttttaaattcttgtttggattgtaattgaaagaaaagcttttacttcataaagtatacctcattatcttgggtggaacattaacttactacccgtataaccaagtcaagcacataaaaaaaggttaagattccatatgaagtatgaacttgtctggactctggagtgcttttaacatatgtaagcggttgcacatgaatcattgcaggcacttcttgaacctgcaaaatcaattgcaagtaatgcgggagttgatggagacattgttgtccagaagactagaacacatgattggagaactggatataatgcaatgacaggcacatatgaagatcttttgaatgctggagtagcggatcctagtcgtgttgcaagatgtgctcttcaaagtgcagtttctgttgctggtgtcattctaactactcaagctatattggtggataaaataaagaaaccgaagccacctgtacccttggtccctggcataactccctaagatagagaaaacagttagtacaatttcgaaaatagagtttagtcatttccagtgtgcatgccattggtttagtcaaggcttgtgaatgacccttgggttggttaatactccagcagcaataagaatgctcgtttcaagaatgggaaagtcagagtttgttgcttcttactcgagttatgacttgatgaaacccatgtgtcatgaagcaacaggaacaattagacaattgatgaagttcaaagtgcattccactgggaattttgattagtgttaggtttctttcttcgtttaaccgattaattttgttgacaccaatgtttttttttttaattcaagttattgacaccaatattttttttaattcaagttgttgactccataattggtaatagattaatagttttgttccataaaaccggtaatacgatattatgaggagattgttgataataaactctaattggggtgcttttagtttgctgagtcatgggatgattatagtctatatgcttcaaaataaggaaatataaatgttgtcttgtggttgatcaggatgtataagtattataaatttttgaatgtattttttattcacacattaaaaaaaaataaatctaagtggttaatttatggaagacaagtacttaatatataccatctaattttcaattttagtgttgtggtacaaaatttctttgagcaagttttattatgggtgactaaagaaatgttggtgtattagtcaatgatattttataattaaattcgattagtaggtacacctgctaatagattggatgttgaagttaacgtgctacgtggactcgtggttctgttgtttagttactgagtatgttatatactaccggaatgtcaactatcaaatcaagtttcaaactcagtcataataccggaaagaataggctttttcaagtttttgctttttgggtatgtgtttgtggttttgcttgtttgtagttgacaggtctctttcttgtccttttgatagatactttgtaaataaagtagaaaatgattcagttccttgactataatccagttgactttaatacataccaactatatctttaatgacttttactatacacaaagtataattacaactatgtggagttaattgctttcatgaactaagaccatatatgttgcaaagaattaccagtaaccattgcttttctttttatacagacacgtgcttttacttttctcaaaacctaaaatatttttcaatcctctctattttaccaattttcctccaaacatagactatgcacagttcaacagtatgttttactggaaaacaatacaagcctaacttatttttcaatcctctctatttaaccaattttcccccaaactatgcacagttcaacagtatattttactggaaaacaatacaaacctaacttatttttcaatcctctctatttaaccaattttcctccaaacatagactatgcacagttcaacagtatgttttactggaaaacaatacaaacctaacttatttttcaatcctcttcattaaaccgattttccaccaaacaatctagactatgcacagttcagcagcgctttttactggaaaacaataacggaagtcattgcttacttgactgagattgtaaaccatttttcttgttgtgactggtcttatttttttacgggaaaataggttatttatttataggttatgtaacgacaaatttaaaattattttattattattatccaattacaaactattatatacaagttttttttttttattcttatgataattaacctaaaattcatgttaatggtgatttctgattaatttacgctataaaagctttttatactaacaatccataatcattcaattcttttttaattagaacactgattttttgttttaaccaaactatttttttaaccctccgattcactatggagaaatagacattgactaattcagagttcaataggaaagaaaataaagtatgacaaaaaactatttttatcaaggatcaaattcaaataatatccgaatgattccaccttaacttcactgtattaatcacttgttgtgtctaatcacttgcttaacaaaactatttttacattactcatgaggttcatacttgtattttcttgatcttagaagagtagcaatctatgaatgacaaaggcatcttgtttcaactttctacacctacccctattcctttttaggcccggtcctgagcatggtttaatattgtgtaacatccctaattttttactttttgacaactctcacactacaactcaaatgaattattaaaaaccgttaaagataatactttgactataaaaacgagaaggtattgaagtatagacttcacacacgtggacttctttttctttctgaactaggcttaactcctcaaaacattattggtatgtttgattcgctaaaaaaataagagattgaacactacaaaaatatttatttaatgtttgatttaaaaatgactgataaataatacaaaataaagaatgatgaaatggagaaatattaaaaaacttgtaactcactaaactccagtacaactttttatccaatatttaacaaaagtaaaaataagatactattcttattttttgacttttcattatctcacaccttttttcttttttcatgtgtctcctctaaatctctctctccaaacaagatacaacacaaaattacttatagtttacattgactatcaaaaacgtataatacaaaaagttattctatgactcaactatttgtctagtgctattatgtttgtcttttctttttaacaaataaaacgtaccctatgaatgtttcttggccacaaatgttttgtgatttaggtatacaatatagcctaaagttatttaggcatcaaattttcaaacaaagtatgcataaaggagagataggaaaaaaagagaaggaaatgggtaatagataaagtgatttgttagagataaagaagaaaacaaaagagaatatatgatttttcttttagagaagagaatatacgagtttaaatttaatgtaccgttaattagtataaaaataatatattttcaaccaataaannnnnnnnnnnnnnnnnnnnnnnnnnnnnnnnnnnnnnnnnnnnnnnnnnnnnnnnnnnnnnnnnnnnnnnnnnnnnnnnnnnnnnnnnnnnnnnnnnnnnnnnnnnnnnnnnnnnnnnnntatataagaatttgttattgatcaataaagtaataaccctttacattatgaatatacaaactatttacacatcttcttattaataattaataattaataattataaagtttaattataattttagtctctctttaattttttattttttaccgctgatcttagtctcttatttatttttgtaattttagtacccacatttaaaaaaattcacaattttgattaaattctcaatttagtatacatctatttattttattttacattttaattaattaaattatttcttgataatattataaataaatatgttttatctaataaaagagataaaaatatatgtaaaattgagaatttaaccaaaataaattttctaacaagtagactaaaatcacgaaaaaaaatagaaaaaaattgtggaccaaaagaggacaaaatcataatttaacctaattttctaatgaaacagaattaaagagaataaaattctaacagtcatatcacgaagtcaactaatcgtctaatccagttttataatcaaaccaaaatcggcattgaagaaatctttcccttattctagttatttgatgtcatgttatatgtaaaaggtttatcaaaggaaagcaaaatgtggcaatgacataagactaatacaacggaaacaaggttgaaatacaggagtcatgggtaccagagagtagagaccccataaaatctagtctcacaagtaaaacacgatggattatgttggaagcagttcttctgctaaattattttctgattatggacatatttggataaatttttctagaaatacttctagaagaataaaatatgaagaagaaaaatgagatgagtttttttataagtaaaaataagttatgcattagttaatttttagaagcttaccaatataatttctctaaaagatgagatgacatctacaaattagtcaatggaagacttattttaatttatagagaagctcatttcattttttttcttcttacttttatcttctagaagtacttctagaaaatttaacatccaaacagaccctatgtcaagtcttgatcacttgatacttgtgaaaatttgatttgccaattaaacaaaaaaaaaaaatcaaacaaaaaatgtgcagggttcacattagactgttagaaacaccatcgtgataacaaagaccagagcattgccgtttagcacatgtatggatcaatttaataagctttacttatagggacaaaattaagaatgaatcagacatgtatgaccaaannnnnnnaattgttgccctaagtttttttttttttttaatataggcaaatacaataaattagacaggagtgatgttaatatagtttctaaaatattttttgacccactttttatcattaattattttcatttaaaattatcaaattataattaagtagaaatttattaaataaagagtaatactcacaaatttgtcacttttaatattgtgattcttaataaatcttagtaattaataaaaaatatatatttaaacgagtgtcttgctaatatttatctaaaatataaagttaaataatctcaaaggattgtatccaacaaaatatgatgcatatatgattagagtaagaaaaatctaatttctctataaatacttttcaaatttgtagagttttcctatctaggacaatgacactttgccattatcctaattttccaataaaaaaaatgcaagctagtaagttgctatttttgttagtgaaaattgttattaaatgaaaaaatatttatgtcttaaagataaattatgactcctaattattttgattagatgcaaataaatataaatgataaaagctacgtttgatatgctatcagatcataatttgtctctgtgtgtatgatgtttttggtaatgccccatttgcatttggttcattatcatttaattatggtcgttaagcgtaacaattaattaaagctaattaattattaattcagaagcaaataattaagtgatgtcatcaaatgttaataacaatacccactttacattatgtacagtgaaaactaacatcacacaactagaggactaaatgaaccatatacatatatctcaatcaatgtaactccaccatggttgtacaataatatgtatcacataccggattctctcttcatacatcaatatctctcaaaatatactacaatgtacatcaattgcgtatcttcccctcaaggatacaaatataagcataacaaaacaatgagtcaacatgctctcaaaatatatgcctaaggttcacacagaaccatatccctactcgggcctcttgccttgggatccactgtccgctcgctaagcatcacatgcaaaaatataattcccacatggggtgagatacaatctcagtaaactcaggattcttaaaggcctctcctccccctggctcactttcatgacatatagtatcaaaattggcatcacaccatctaaccatcacggctctcataaaacacatcacatatatattacaacacatgtgtcattctgttaggcgctaccaacatcaggaatgcaacacaaatataacacacacacacacacagatatatatacataagattgtctgaggaagatcatccactgaagagcacattctctcagggcttactcggacatatatgacacttccgagagaagatcatccacttaagagcacattcctctcaagttttatcttctatatatatatatatattgaccacttagagttgttccgcatgactttgactctaagggaaatccatatttaatccattctattggccaaagaatctcatcaatcacagtgtacatcatatacatgttctcaataaaaaatagtaacacacaatttcaatacacatgcatcatgacatacataaccatcactccctcggattatggtggaacatagtcaatgggaaacactcccaaaaacaaagagcttaactgctctgagtgctacaccggctctcctggcctcgtggtcgcaaccaccaataacctttgtatcacgtcttacataaaggcatacaagtaatcaaaaacggttttcaaccgttaaaatgaaaagaaatgctattttctttcattataaccctttattactctgttttcaagttataaggactagtcacctaattggtgacttacaaacccccaacaggatctatcttggcctaaccaaggcactagagtctccctaagactctgcataaaccaattcaaagagttcaatccatgccacatttcaatgattaccaagttggctaaaacggttacttcaacacttttttaccgtttatatggtctcctaaacacatcttgtgaaagcaccaaggttcatacataccataatatcatcaatttaactaacatttttcctacacatacattcctcatagcccaatttccaaagtccataaaatttctatttcaaggctaaacctaatttcagctctaactcaaatgggtcagtattcatctcaagaacaaattctcaaataatcaataaaacatgcgcttcttacctctaaaacgtcaaggaaggctagaggataactcctccaagctcgaatgtccttaaaacgcctttttttccttccaaaatgaaactttgagaagttccctagagaacgcgatctctccgtttaatggttctcacgaagaactaaggttggaatatagctcattgagtggttcccttcaactttcatgttggatgcgaagggttttggtcgaggaatgagtgggtatgaagcttttctcccttgtcaatggcagaaacagagcaaggaagaagagaatgaggttttgggtcataaaacgtgagaaatggccttttatagtgaccttgctcgtgtcttcacgctaatggcgccattctggagctactggcaccaaaaatcagaggtctggacatgtttctggcgctaatcgcgccactctggcgctggattccaaagaaaattggttatctggcgcatctcccccgctacttgcgccaatctggcgttaatcgcaccggaaaccaaagacctggcatgcatttggcgctaatagcgccagatttttttttactggtcattatatttttaaataatgcactcataagacaatatgatacaatataatgaccaaggctaaaaaaaattggtgaaacctctggttcccagcgcaaatagcgccagctgcggtgctagtagcgccagacgtggcgccattagcgccaaaatgcaccagaaggtcatttttctctagaatctggcgcgccccaggagcacatccagaatggcgtcgttagcgcgaagacgcgggctggtcacttaaaatcgacatttctctctcattttgggtcaaaaacataaccttcttcttccttgcttcgtttccaccattaacaagggagagaagcttcacacttactcattccttaaccaaaacacttcacttccaacatgaaagttaaaggaaatcacctaatgagctacattccaacctccattttccttgaaaaccatcaaacagagagatcgttttctctagggaacttcacaaagtttattttggaggggaaataaggtgttttgaggatattcaagcttggagaagttgtcctctaaccttccttatcgttttagatgtaagaaacacaaattttaccgattatttaagaatttgttcttgagatgaatagtaacctatatgagttagagttgaaattaggctttggtcatttgaaaaagtatgtttaggaggttgttgtgatgaaggtttagccttgaaatataatttttatggattttggaaattggattgtgaggaatgtatatgtaggaagaatgttggttaaattgatgatattatggtatatttgggccttggtgccttcacaagatgcgtttaggagaatatataaacggtcaaaatgtgttgaagtaaccgttttaaccatcttgttaatcattaaaatgcggcatgaatagagtattggactttttgaattggattatgtagagtcttagggagactctagtgccttgattaggccgagatggatcctactgggggtctgtaagtcactaattatgtgactagtccttataacttagagaaaagagtaaaagaggtttaaatggaaaagaattgcgtttcttttcattcaacggttgagagcgattattgattgattgtatgcctttatgtaaggcgtgatacagaggttattggtggtttcgagcacgaaaccgagagagccggtgtagcacttagagcaggtaagctctttgttcttgggagtgtttcccattgactgtgttccaccatactccgagggagtgatggttattgtatgtcatgatgcatgtgtattgaaattgtgtgttactgcttttattgagaatatttatatgatgtacactgtgatgatatcttgtgtgattgatgagattctctggccagtagaatagactgcttatggattctctttggaaatgtgcccttaagtggatgatcttcccttggaagtgccatatatgtccgagtaagtcctgagagaatgtgtcattcagtggatgatctttctcaagcattgacataaagttccgagggaatgtgcccttaaatggatgatcttcctcaggcaatatgtgcagagtcttgagagaatgtgcccttaagtggacgatttttctcaggcaatgatgcagaaagtcctgagagaatatgtccttcagtggatgatctttctcaggaaatgttatatatatatatatatatatatgctatatctgtgttgcattattgatgttggtagcgtccaacggaatgacacctgtgttgtgatatacatgtgatgtgatttgtgagagccgtgatggttagattgtgtgtgatgccaattttgatactatatgtcatggaagtgaaccagggggaggagaggtatccaagaaccctgagtttactgagattatctcaccctgtgtggggattatatttttgcaggtgatggtcagcgagcggatgatggatcctaggacaataagcccgagtagggatatggttctgtgtgaaccttaggcattttattttgagagcatgtggctcatttattttgttatgcctgtatttgtacccctgaggggaggatgcacagttgatatacttgatgtatatgttgtatatctggagagatattgatgtatgttgagaggacagggtataagataccttattttgtacaatcattattgagatatatccatatgacttatttggtcctctagttggctaatgtgagtatttaccatacataatgtaaacttatgtttcgttgatgacgtcagtttgttatttgcttctgaattaattagtaattgttgtacttaacgaccataattgaatattaatgaaccagatgcatatggagcgttacatacaacattgaagtagtgtatttaagacctttatttaatactctatatatgagattctttcatgcaaaaaacattatcttaggatatgtcaaaatcctatgaagaataaaagaagtccacagtctggaagacattgattctcatcaaaaggcgcaccctgttgttacagacctacaatgatgaaagaagttacttccctgctaaagtataagacacgttatcctatcatgatagactttgcatgaagaatggacgtacatttaatggaagcattaaatgcttcaacggactcatgacctcaaacaaagaagagagtaaagaattcaatagttgaaagacaatgaatacttggagatgaagactatatatataagaagttttgaagaaacaagacacaaatcattctttcattctttcttgtaaagctttatgtagatttttgtaaatatacaaaactcttagaacaccttgtataccttatatatataagcaatgacttggtagaacaaagaatactgaatttaagtcaagcttgtggtagaacttgtaagtgtaagagtcacaagtggtagtgaacaatacttgtaactttgataagttagtgaaaatttgatggttaccaagaacttgacttagccttgtagttgagacaaatcaatataaattctttgtatgcttttttgtttaagtgacaaaatgactttgaatttatttttagatctttcaaagaaaattatttttctcatcatttgatcctttatattaatcagattataaacgtgtcttacaatcttaaaaaaagttttaaaatttttctaaaaacttaatttaaccccctcttcacaactatacaatttagagtacttaaagtttttatttcaaatgaatgatctttgtatgtggagaaatgatattaacatattttttaatacacccttttaatatattttctattattacttgaaatttatctaaaaatacattttttatatgtttcacttgtaattttataatttttataataattttttgtcaataatatagaaatgtgttgttgggtcaataagatttaactcaattgataaaattgataaaattgtgtgaattatgataaatttttaaatattgtttttgattcctatgattaaaaaatatatttaatcagtatagtttatattgctgagagagttagatgagaatcaatttatacagatataaacaaattacactttttcataaactttttcttttaagttacaatttttcttttaatttacacataggtctataagtaaaaaaatgacgtatgtatgacacacgaataaaattttaagaattgaagccagaaaggattaaacatttaaaccattaaattagccagtctcactgtaggactaggacattggaagaaatgggaattactgactaaacacactaaatacttgacgtacataccccattttacacagagtaaacataactttggattatataagaaatgaaattatacatatttttcttttttggtataggaatgaaatgatattggcttgatgtgcaagccaagtatgctaatcaatggcagaaataaatgcttcaaagatacagcacttggctttaaagtatcaaatatttcccaccacactaatcacagtcgtcccagtaggcactaccctatgattcatatatatctgtattaaaaatacacattatgtgaccccacatcattattgttctacagattgttccacccactataccttacaatttattgtatgtgccgggatagcaatggcttggcagaagcataatgaaacaaataacactatattaagtgataagaatttatatttttaataaaataatttaagttttaaatcctgattttggatataaaataaattatattaaaaaaagaatatttatattatatacagttacaatatttgataaagattagttattatttttaataataaatactttataccaatattgtaaaaagaaaaaaaaagaaaaataaagatgattaatctatggattcttattaaaatatttttagtacaacagttccatgacccaccaataatctacagatacctcgtacagtggatgacgctggatgcaatggcgtggttattactctctttttaaccatcatagcattgttgatattgggtgatatatttatgacgtctatgcaacataattatggagcctataaacaatagagtttctgtttaatcctataaataccattaattattatcattattattaaatgatatttttgccatgaaaataaagtgagactatccatataatatttgagggttttaaaatataagattcactttaataaatattatatattctcataaaaactaaaaatatttggaagactaaagtgaagatgtttatggacgacaaatggatctagatgaatctagctctatgtgggtgagtaatttcaggaaaaaaatatatggaaatgagtgtgtaaataagtattttactactcccatctacctcaaaaatttgcatgtatagtttaatgcatatatttaaaagtaaatataatagaatgtctattattatttggatgtaagtttttttgaaacacttttatagcaagaaaataagaaaaaaaaatgaaatgaatttttctataaattaaaatgaattttttattaattaatttatagatgtcatctcatcttttaaagaagttatatcgatgaacttctaaaaaatagttaatgaaaaatttatttttatttatgaaaaaattcatctcattttttcttttttttaaaagtgattctaaagaagtttatctaaacatgtccataatatatatatatatattatattaataaaagaatttaattaaatttattaagtaaaatatatatgtatatatgttgaaaaaggagtttaacacaagttggttaagtaannnnnnnnnnnnnnnnnnnnnnnnnnnnnnnnnnnnnnnnnnnnnnnnnnnnnnnnnnnnnnnnnnnnnnnnnnnnnnnnnnnnnnnnnnnnnnnnnnnnnnnnnnnnnnnnnnnnnnnnnnnnnnnnnnnnnnnnnnnnnnnnnnnnnnnnnnnnnnnnnnnnnnnnnnnnnnnnnnnnnnnnnnnnnnnnnnnnnnnnnnnnnnnnnnnnnnnnnnnnnnnnnnnnnnnnnnnnnnnnnnnnnnnnnnnnnnnnnnnnnnnnnnnnnnnnnnnnnnnnnnnnnnnnnnnnnnnnnnnnnnnnnnnnnnnnnnnnnnnnnnnnnnnnnnnnnnnnnnnnnnnnnnnnnnnnnnnnnnnnnnnnnnnnnnnnnnnnnnnncactatctactaattaaaaattgctttacacatgactttttagatcattacaaaagttaataacttaattgtccataataaatgatgattgaattgaaaatgataaatttatatgaatctccttttttattgaataaattctattaataagtttgtaattatgaaaaaagtatgtaaactaaaaattactaaaatacatttgtatgtttctaacatccctcaattaattaacatggcatacttaacgagagtttaaatgcaaaaccaaaaatagaaaatcaaatcaatcagtacattataacaccttaaaaagattctccaaaaaaataataaaataccttaaaaagaaaatataatcacatatgctatattccttaactatttaaaattaatgttccaattccctcaatttctacacaaggctaaaagatctcagttatatacagattagtaacaattgataaaaagctttgtaacaatagttggaagaggaatattagcaatattttcttttacacatttttttacattaattaattattttaaattttaatagattttactttgtatttatttaatataaataaaaatcatttaatatttaatataaataaaaaattattaaataaaaataaaacttaccagaaataataatttttaatcaataaaaacttaaaaagagagttttagatagtgctgctatgattagattcactaatcactatgtttaattgtttgtcatcgtatgtgtatgtgtatttgacgagtctacggacagagcgaggacgcggagacgcacgtcgtgaagaagtgaaagcgaagaaataggcgtcagaacttcactgaaagagaaaaataaaaagaaaaacggcggatctgtctttttagtatatttaaaataaaaataaaaaaatacttataattagaaaggaaggtaaacactaacaataatatctgcgctgaaagtgcagctcagctcccgcacttgcaatcttgcattgcagaattcatattcaattcccacgaaccacccattctcagctcagatctgacacactccgattccttcaacgcttctctctctctctctctctctgctgcgactgtgagcttctcttctctctctctcttgctttgaatttggttctgtggaaagaattgcttctgcttttcgttgtgctgttttgctcgcaatgtctgatttggtgatattttatgttatttattttagttacatttgctgcttttggttattctgctactgagctcatcaccgcgaaaaatggaattaggttttaggtctctcttataccttaaactgcaaaattcgtgcttacaactcgccaattcacttgactaaggcgtcgcgtgtgctcataaattgagtattttgattgtgagctcattctttcgttgtttaatttatttatcatatatgttttggaagttgaaacagagctcataatgtagtattttttttttttttgaagattttaggtttacagtatagaatatttgttagaggctctttttatggtaatcaaattggatttggagtgacttttacttgaatatgaaaattgaaatataatggaattatgattgtagagtttgagaagcttaggagattagttggtgtttaatttatgcatgagcttgatttttggaaaacttgatatgcagacggcttattagttcatggcaaagtcaaggcagaagttatcaaaccaggattcttcgttgtcgcctactgctgcaagatcaagggagtgggatggaccatctagatggactgattaccttgggccggaaatggtttctccgttgtcgtctagtagctccaggaatatctatcatgatgggcagtctcagggcatgacgccggcccaatcgcacaagggtatcaacatgcagtgggttgtccaactcactgaggttgccgaaggtcttatggctaagatgtataggttaaaccaacttttggattatccagatcccatcaaccatgtattttcagaagggttttggaaagccggtgtgttccccaaccatcccagaatctgcgtgttgctctctaagaaatttccagaacacttcagcaaattgcaacttgaacgtgtaagaagtgaaaagtgatctgatatgctttacatttttgaatgttgtttatggcctccacaaatttcatcatttggcaagaaaatggatgcagatagataagattgcttgggattcattgcaagatcatgcagagcttcatttacagagcctggaaccgtgggtgcaggtacttttttattaatttttattactgttttttccgtgtgtttcccattcattacccttaagcaattgaccaaaggttttcacattccagttgcatgccctctcattagacaaaatcttatacatcccttcacccaacaacttaagcttttaggttagttgattcatgcacctcaccttacttgacttgctggattagtttgagctattaagacttgccgaattctacttgtcaatatctttgtttaatcaacttatctgcatgagccatgagtaaataagaatctgaaaatttgtaatttgcaattcatttctagttttttttttctttaggaggaaaggttgaaaagagtgaaagagaaggctgaagcttgtactaaagtctaaacatgtagtttacactttacattttaaacatatataacacaaagtactgtagcacacaaacaattagcatttagaccaaggggaatagttttactcaattgaaccattatactattgaaaggacacccaaaaactttaaataaactactcatagatattagatacaccaaaaaaccagttacaacttatccaaatcattttccccctagtgatagttgctttatttataacaagatactgccaagtgctaacatctatccacgttcttcatttgaagattgtgctgtaatcctattgttcttgtttcatgtaccaatccacccctatgctttagctattatacgttgggtttggaatgcactctttgtttctttcacactatgattaattctgctgttgatgatggcaactacatattgttattaataaactaaaatcttcaccctatttcaaagttcaagcttctctcttgattagatttatagataaattcatttattaacgtggacactcattatttcttcatgaataattctttctgtggttttggcccatggtggtttcatgggagttgccattgccaatatggagtgaggtttgacaaacttgctgcattctgagtgttattgtttctgtgtcttgtattttatgataataggataactgttacttcccctgttgtagttctccctttcttctctctaattttacctttttaatccaaaagaaagtatgaatagttgtcatacataacactgaacttggtccttctatttatactataatctaggttaaggtaccagtgtagtgcaatatgtacaaacctagcttaataacaatcacaactaactagtaccatataaataatattttttaacaaagaataccccagtattctgactgttcaggtttcaagttacgcaaacaaagatttgtaactttggtgttttgtgcattaagacattttactttgttatcaatgaagataacatcaaaagttaattgggaaaaggtccatttcacctttatgccttgcattttttattatatttgatcgttcaatggtttatgtcctcttacatttcccctttatatgcacattatcagtaaaatataagttatataaaatggagctgtttctgcattctcctgctatcattgaccttaatgagatagattataggtttcattcataatttatgattttgatcaataaatatctttattggtgtcatttatgtcaattagaacttgcttgtttatttcataacttttagattttcaattcatgttacctgaactcctcgtacagtaatgattcatttgtgtgtgcagctacttcttgacttgatggtgtttcgtgaacaagctctgcgacttatattggatctaagcagtacagtaattaccttgttggtgagtctgaatattgttacaaggatctagccctttcttcatttgagtcttgactcttgagtccagaagctttcatcattgatgaacaactgtgctagtaagacaaaaaaagtggggagtttcatcaaattttcctaaaaaattgttcaactcttatgaaagcttctgaaattcacgtgtcatgcatcaaatattgaataggaaacggggcatagtgagtttgtatttgcccctttttagctcatttatctgaaatcatcactccagtgaaatggtttaaattttttaatagatgtcctaacattggaaataaactaataagtaattagttaataatttgtgcatatcttaaataacttggcagtgttttgcagccccatcagaattctcttatactacatgcatttatggatctattctgttcctttgtgcgggttaaccttttctctgaaaaggcaagttaattttccttctatttttcttgacctttgtttttttttttttttacttatgaaaagctttgatgtttttgaaataatttttctggtcaactatatatgaatgtaattatttctaaaccaatgttctcataacagatgccaaggaaaatgttgctacagacctataactttctacatgcaatgtcaagannnnnnnnnnnnnnnnnnnnnnnnnnnnnnnnnnnnnnnnnnnnnnnnnnnnnnnnnnnnnnnnnnnnnnnnnnnnnnnnnnnnnnnnnnnnnnnnnnnnnnnnnnnnnnnnnnnnnnnnnnnnnnnnnnnnnnnnnnnnnnnnnnnnnnnnnnnnnnnnnnnnnnnnnnnnnnnnnnnnnnnnnnnnnnnnnnnnnnnnnnnnnnntttttttttttttttttacttatgaaaagctttgatgttttcgaaataatttttctggtcaactatatatgaatgtaattatttctaaaccaatgttttcataacagatgccaaggaaaatgttgctacagacctataactttctacatgcaatgtcaagaaatgagcgggattgtgacttttatcatcggtaggatatgttgataagttttcttgaattattgtctatttcttgtaaacaataattgataggtatgcatctgtacatacacatatggacatagcatgttgtataatccagcttttaagaaaaaggattcttttagtccaaaaaactttccattaagaaagttgcataaaaaaatgtctcaaacaaatgctgagggccattttgcaatgcaattatgcatacttggcttgttttagtggtgatgggaaggatggattggagattctagtaaactctgggcttatactccctgtactggtcacattgtgatgtgttgcagggcttttaaacacaggcaacagaacatagaaaaactgcaaggcatatgaagaaacttagatgtttgaaaatctccaagaactagttagctataaataaacatatatgtggggatttgtttcccttggtcagaactagtttgatgtgcgtgaccctcacttcctcttttcttccaatttgggggcttcccatgggacttccaacaagtttcgcttgtatgccatgggtatttgcaatgttcacaccatggtctatcagatcagatctcctgctgtcttcccctccttggtttgtagtattgagagcagaaccttccacttctaaaacagggactgacttcctaattttccttctctaggttaatcatatagcacaatccaaaatacaactcctatctataatcaggccattgtacaatacaaaaaatcatgaactagtcataattgaaggattagactacaaaattaatccctaagggatggaattgacgaagaataataaaaaatggattttactctagctttgatatgaaattcttttaatttagtttttccctaaccattgtcacctttattttttagcagataaatgttccttgttttagttcttatatgtttctttctctactttacagtttggttcagttcattgactcttatgatccaccactgaaaggcttacaggaagacctaaattttgtgagccctcgtattggagaggttaatctcatcctttcctgtatcaatattatataaataattgccaagtacatatggtaaaaaagacgagtatattttctagatttctaactaattcatgatttgtcttttcatgattaagttcaatttattttagcctttctactttttaggagcagcattagttggtcttaaatctcgtggaagggtgtgaaaggttttctttttatggtgatgactgagtttgtgatactttggtggatttgcttgagatggacaatactataatattgaataattaagttatatcacctgatccccttcatttgctttgggatagaaactaagtgttgctttctttgtcatgtcttgcataataggaagtcattcctgttcctccgcctaaaattgtcttccattgcttaaaaaattgtcttccacaaaatcttctcttaaatgttatataaataaagtcattcctcttcctccgccttactgcataagcctctaggatagttggtcatttgacatggtattcaagcctctttgaccaagtggtgaggtgtttgatcgttgcctcccccgttctttataattaaattaaatttcagtacaagataaagtttttccattcactctctatgttgcaagattgaagggttcttgtgcggagaggcttgttattgatagataaaaaccatgctggacctctacttaacggctcaagcttttagaaggtttggtccttaacattatataatattaaaatttaaccaatcatttcagcagaagtcacatagttggtatgacctgtgtcttttggttccttataagtgaaacttgagacctagagaagattgcatatggcatttagttgttgaatgtaaaatctcaatacgcttcctgaacagtatagcttctgcttccagatttagtatgattttcatccaggataaacttatcctgttacttgtaatcttttcaagtgaataaaatatgttctctaatgcagcgaaggaagattgaacattttagatctgtttttatactacacatgatgttttatttatttatttttatgtaaagaatgagtttcttagttaatctcctttatgggtgaatcactttatttgacaacttgttaatatattgctgttgagatattaatagatatatatttttttattctgagatattgatagatattaacatatattagagatattctgatttcattgttttccttgattctttcctagttatgtaattcacgttaaatattgtacagtttgtataacaacacaattattcactctctcaagtattgccattgaggtcttgatctcttttttcaggtattggaggctgtgggtcctattatatttctatcaacagacacaaggaaacttagaaatgagggatttttaagtccatatcatcctcgttatccagacatactcacaaattctgctcatccactggtaatgttaatttttgttttaaatcatattgatatagacttcttaaattgataacttattacactgaggtttttttctcattcaactctgcagagagcacaagatctagcaaatgtaactgcatatcgagaatgggtgttatttgggtatcttgtctgccctgatgaactgcgtcgtgtcactagcattgatattgctttggtatagttcatactttgtacctgtagtcatatacctatgttgtgaagtttctattttactttacaacatgtggagggtactgaaattgtttggttttactggtgcaaaaacacaaccatgttaatacaattattgagatttgaactggtggccttttaaacaagaaagctttaatacaattttttatagctattctcttaaaagtttaaattgtaaagagacgtgcccaaccatgtatgttagtattagtagtagatgaagatacggaaaaagggctcatctgactcatccgtggtcctatttcttatgcatttatattcgttttatgcatgtagtgaagatactgaagtgtgaataaaacaatatggagctttttcttgtcttggggtttatgctgatatttgagatagaaaggtaggtaggaatcttttatagaatgaagaacaaaatctcacttctgtaatcaaagtaagtgcagactaagggttacaagaaagtcaatcccagagaaattagagagactctggactctcctaactgtctaacaattctcagcctccaaagacccttaattctcccaccctcccggtacatatagtaaaccccttaactaatcataacaaatcaacctaattaacttcaactaacctctgtttacatttgctcttggttatcttctggcccattccttcccttcctaaaatagacctgttttattttaggtcttctaacaatactccacatcaaaactttcaccttgtctcaaagtgaaaatcaggaaaagcagattgcaacgtagtgagcagctcccaagcattctcacagtcttgtaaccttttttatttgactagcaattacattgcacctgcagcattgtattgcaattgtagaagcttctggggttgcccttgtagttcccagtcctcagatcgctcagttggtaatggctgaggttgtgcagctgttgacacagccttctttaaaaggcatacatgaaaaacaaggtgcacgcttctgtggtctggcaattacagaaggatatttgataagaatggtatagaataattcagcttggctttatcagataatatagatggaatattatttagtgttaagtcaagttcttgggtaagccatacagggggttgagatataacttttatttcagataaaaaatgatacactttccttactaatagtcatccaaatgttgttataattacagtaagattttatattgatattatgtggattatagttatgctaagtttacttccttaattctgtttggtcttggtatttcaggttgtactgaaggaaaatttagtgctcacattattcagagatgaggtaatttttgcctattggctttgaaacaatgtctttaactacagtagttgacaattttgtaataatcattacacagtacatattactgcacgaggattaccagctgtacgttcttcctcgaatattagaatctaagaggatggcaaaatctggacgtacaaagcaaaaagaggcagatttggagtataatgttgcaaaacaggttgagaaaatgataaggtacatacggaattccttttatatatattattgtgtcagagggaatgagagaggtcaagatagtgaaatcttgtgagttgtccatgattattccaggttgctattttcagtgatttggtgactgaattctctaaattgtcttggaataataatgaaagcagttatgcattctaaacttagaagattgaaacaaaaacaatgaaaacaaaggcttagtacttttgaattctcgtccagttattggacatgccttaattatttgatgcactttcttaaaattaaatactccctctggtcctttatataagaaacaattgagtccatttttttggtcttaattataagaaacatggacccactttcaaatgtattaattgctattttcattctataccctttctttactgtgaaatctattagtgagatgcccactcattccccatgtaagtgatttcatttattgacctattagcaatataaaattcattggtggaaaaaattatcccttgaattatgtgtagtgtcattaaatattaccactacttaaatcatttaattttatagctatttttggaataaaatttaaatttctgacattattaattaaaattaactaaactacttttattggtcttgatgaattagtttagttatttgtttcttatataaaggactggagggagtataatagaagggatatagcaaattttgtggtatcactaaagtctttttgcccatttgataagccatgcataagaatttaattgtgtaccatttttcagttcttggaatgcttattttattaaggttagaattagggaagtttaagatttggcacttagatgttttattttatggggttcaatggttttcttagcctctttatagagtttgcatatacttttattttccaaaattgccggggttgggcacgaagtggttcacttcaaaaaacttaactgaatggtgaccttctgaatccaaggaggcaacaataaagaataaattatttttttcttttatctgaaggaaaacattctgtattgttatttgttacatgaaattactcttgcaactcttctatttttttatgtagatatttgttactcttttctggggtgttttcttttttcattttttgagggatgattcatccttactattacaattggcagtgctaatcacaaaactgattgactttttcagtgaagtgcatgagcaagcaatattatcttgtgatgccatacatcgtgaaaggagaattttattgaaacaagagattgggagaatggtgctgttttttactgatcagcccagtctgttggcccctaacattcaggtgtctttcttttggcattttgaagcatgaaaaaaaatggtgtctctgacatttgttactgaaacttttggtattgttttgcttataaatattcttgattcacttttacacaagagcatattattacctctccttttgttgtttcatatcattaagagactagaaatctttataaaattacaacaaatgagctatagaaaaatatttttagaattctagttactcaaccaaataataatgttcaaagaggggttaatgtgtaaccacttaataacttaattaaccaagtggataattgttcctaaaaggttctacaaataattttagttgtataattttctgatttttttcaaagatacttgatatgatgcttatgtggtttctatttgaaatttgctgctaaaactttcgtttatagtctgatgatggtaacagttcttctgttcatacctaatcattgttaatcccttttggatttgatgctcctaaggggaacttgggcaaaggttagcatccctattatttaatcaatacaataaagtccattactcttgtatatgttaggcattgtgtcattagtgtgttgaagttccacattacctgtgatgagaagcttaaataaacaaaaatgctagctcaaatcaaaatgacttctgccctctctttcctataatacattttggcagtgattggcgaatcagagtgcacatacttactcaatttgtacttgaaaaggctaataatctgcatatcttatgaagaaatacgtatatgctaaatattatataaaaatgatattaaattcaccaaaaaaaaaagttgatattccttattcttaatgaagctgtataaataagagcttagccctaaagttatattcaaccttatcaatttaataactgaactgaacaaaactgagcccaaatagtttgtgactgttctgtttatattcagtacaccttttactggttgacatgcttatgtagatacttagaagttagtgtttctgttaggctgttagcatgttaagctaaataggcttcatatacatttctagacttgtcttctcttctgtggactcagtgtggtatgtcaattcaaattaatttgagcatagtactatacttgtttttagctttgtaattagttagttaattttcttttagtattttgtgtatcttcacctttttaaaataattcgtttgagaggatttaatctttgttgtagatggtgttttctgccttggctttagctcaatgtgaagtgatatggtatttccaacatgtcggaattgcatcatcaagatctaaaactactcgagtggtaccagtggacatagtaagcttttgtttattattcttttattgccttttttaatcaaactagtgctcttttctaagcaaattacaaaattagggctttctaaaacaattagaattggacttggtttaactcaaccccaaaaactaacataaggtgtgaatattgccccaaccttatgaggactattttggccattttttttctggtgtgggacacattaaatgattaaatacactcctcttgtctattaccagattgtggaaatctagaatatgaagttttcttggttggacatatgtgggtggccaacatcaaggctcgtaccatattagaaatgaatttgcctgacacttgaaaacttgaattatgaggaaaagtgaatatcattttttacaattttataatgttagggtacaattatactgccttagaaataaattctatccctagtaattttagactacaaatatagacatataggaaatacagaagcaataagaattaatcctaattgcaagaattaaggaaactaaatatatgcaaataagggaaaaatattgaattataacacttattctcaagctggtgaatgaatatttattaattctcaactcaacttatacataagatcttggaagtgctacgtgggaagtcttatggacttttggtcaatacatttgccaactaaagccaaagggacatatgtagtagtcaccatgagactagtatctaatttttccttgatgaaatgctagcctattaccctattacaatatatttcgtcccatcatgttgagttagattgtgtgctatattgatggtagaattattgtcacaaaagagcttcatactgaatcttgagatcaagtataattttcatccataatagttaacaaatcccttgatccataatatggaattctacctttgcattagaccttacaaccatattttgcttttcactcttccatgttaccaagttaccaccctaaaacatacaatgccctcatgtagatctcttatcaacaacaaaccctacagagtctgcatctgtgtatacttcatggactatttcccagcttttcaaataatagtccttgtgtggtttgaaagggagaaggggaaaagattcaaatttgatagagggactgtatcatgtgaaaaaaaaaatgtcacctagtagtagtagacatgctgataaatggtttgaaaaatgtcctaatttgataaccagtttgataaagggctgtcgttgggtgaaaaactcttattgcatgttctctaattttctttaaccatatagtttgaatctattgatatggtggttgacttaaaatttcatgatcatgttttcaggatccaaatgacccaacaattggatttctgttagatggaatggatcatttatgttgcttggtacgcaaatacattgcaggttagattagctttatgtatactactttttcctatagttagggaataggatactacctctggtcattatataagaaacaaaatggtgtatttttttgtcctaattattagaaacatagactcattttcaaatgtattaattgctattttcttttatgcccttagtttattatgaaatctattaaatatgacacgccctcattccccatgcaaatagatgcgttcattggcctattaacaatataaaccatactcattggttgtaaatttatcccttgtattgcaagtaatgtcattaaatataaccactcacttaaacaatttaattctatgggtatttctagaataaaatttaaacttaagacattattaattaaaagggtaaaatatgtttggggtccctgtaaaatttgaaaagtattagtttggtccatgtaaaaataaaaaaacatttttgttggtcctcagtggtaatttcgttagatagtaatctgaagtggctaacaaagtttcacgtgtaatttgattacaaatgaattaaacaatttgtggcggttaaaacctcccaaaatgaattaaacaatttttggaggctaaacacccccaaaaattgtaagttttcatcccttcctgggctattttcttgcactttctgatgagattaggggggaagatgaagcaataatgggttccggtgtttgaaggtagaaagagaaagtaattaagttcgttagccacgtcagcaaatcgtcttaacgaggagtttccactgaggactagcaaaaatatgttttatttttacagggaccacattaatacaaaagtttttatgaggatgaaattaatgtttttcaaattttttaggaccccaaacatattttacccttaattaaaattaactaaactattttcattggtcattatgaattagttatttgattcttatattaaggaccaaatgtagtattaaacaagtgtttttcattatcatcaagtatgttaaaatacttacgttaaaaaaattatgcatttaacttttaaactgctatatgcatttaaatttctatatggcacatttgttaaattgaaaaagttgacttgtttgtcttagaatttgagatttagggcctaactcatcctttctctttaaactaaagttctataatgggagatctctcatatccatggcaactgcagttcctgtgcatatctctgcatattgtaaaattgtaaaaagattatcgttattttgtatttgtggagccttcggctagtggtcaagagtcattatttctagatgatggagtcgggataaatctctggtattggagctgtggaatatgagaaagatatggaatttggtgaaaataatatcctgagagcttgactgttactaatatatgatccctgcttcaaattaaaaaaaatgctttattttttattctgattttagttgatactttatgtgcaagagtcagttgctacactagcatttctttcccttttttttttttttgcatggatgttttggttgttaaatgttgtttcatttgatttgagtgcagcaattcgaggttactcattgtcatatctttcatcctgtgctggaagaatccggtttttactaggaacccctggaatggtggctcttgatattgaggctagcttgaaaggacttcttcagcagattgttcaccaccttgaaaacttgccaaaaccacagggtgaaaatatatctgctatcacttgcgatctgtcggtatgtgggacatctgtactgggccttttttttaatatcttgaatgtgggacatatatgtattttggattacagttcattataatcttttatttaaatatacttgcattggcattcttagaatgtgggtttgggcctaattcaacctcataagctagctcatagggtgagggttgcctcccacttatatattctatcttggccttatctctagccgatgtgggacctgggtttttccctatagacataataaccataaccaagttgccacttgccacctttgtgtagaatttgtttcattcaatacaacttgtgcgcatcatttgcttattagtcattggtatggtaaagaagaaaaaagtcatgctagtgtgctaatgcatgcaaaggttgtaagtttgtatagctcttagtgtcagaaccttagtttatagtttttctttctgtcattttttctttgttcttttctagttatagacaacctaatcttttatcgcacttaacacttactaatactattttcaggattttcgaaaggattggctatcaattttattgatagtcacatcttcacgttcatcgataaacattaggcacttggagaaagctacagtttccaccggcaaagaaggattattatcagaagggaatgctgcttacaattggtccaggtttttattcgcaattttgttttgtttacctatgctagtctgatatttaatcccctttctctaccccccaatacacacacaccctatttatagaaagtatacaaaaaaaaggattcaccttagtatagtcaaaatcgtgatcttttgcataagattgtatgattttactatcttaagtgttggttgtgctgcaatcacgatctcaatcagaattgcaatttgggatatcgccatgtaagagcgtcggattgagcaatgtcactgcgcttaacaaatctatgttgatgttctgacctgtgacccataatgccgcactcctgaaaaccctaaatcagccaaaccttaccccattttgtgccattcttcttcacacccaaaacacctatcactggactgctgtccagttcctcttctcctccgtcagtcttcatttcttccattgctcctcttctgcacctttgtttgctgggtggttggttttccatttctccttttctcttctgtgcatatgctttggtagctgctgggttctctattttcttcttctcttctgtgtctgtatcactgggtataggaaagggaaagcctaactgtcctgtaatagtctgattcgaagttgctgaacagaactgaaaatgtcttcaaacccaatctctgccgcttagattatactatatttctggcattcaagtttaatgtcttggcacttgttaagaacttgtatttggtattttcttatgtttaagttgttatgtgtgacttatgatttgttaataatgacattcttatggatttttaagtttaattaaatctttatatgaatttcataggatcttatgatttgtgttatgaacctgcaatttatgatcttaactcaccagttccaagtaaaatctcaattttgacctttatcaatctatttcctagtttgggggacaattgatttatcttcaggccttttagacagacaaattaacttatcaatagtttataaatatttatgcagatgaacttaattttgtactatgaattagtatattcaattgaggagcataacgctagatctttttgctggagatttcttgctgtctgccctatgtttctttgacttttagtaacccacatattcatagggactgatccctgcccttttgttgtactagcaggacatcttgatcttctgtcttgtactctcttctcttttataaaatgcttttatagtttttatattactactggtaggggtgttcaacgggtggattcgggtttaaaatatccaatccgcacaaaccgaactatctcatatcttggcccatatccaaccacagtttccatcggataaggtgggttacgggtttgcgggtcatgggtcgaaacgggtgggttgaattggtttgaacatctgtttgcactcgtattctatgcttcaaatgtcatcttcctcgcaaaagatcatactggttcaagtcgacattgagagttccttatgtacgtggccagactcctcgtcgttggtggtgcgaatggctttagcacctaaactcttacagaatacaaaaagaagaaaggtgaaagattgagaaagagatatacacacccatgttaaaacaaccttgtagaactgaaagagattgagagaagatattgagatttagatgagaagaagttgaagcggtaggtagctgtagcaaaaagaagaggaaaatgaatggtgaaagaagaaagtaggaaaccgtgcgtggagtgtgtagctgtaggtagcaattatcactcatgtctgggagaggaaaaaagctaaagcgttacttttgagaatgtgactatgtcattatgaaacttttcagcattgtaagttataataatattttaagatttgaacgaagcatagaagtaaaaccagcatgttattaagtaaattcggtcaggtgcaggtattgatggttacttttttccaatccgcacccgcccgtggctaaccatgtgaaaccaaattttccgcttttttaaaccgagaccttaaactgaccatccaacaaccgattttttcatgcggttttaacgggtttcgggcgagtaacggttccttgttcacccctaactactagagggccttcatatagtattatatttttggattatggcttgtattatgcaattattcatgtgccacgtgtgtgtaaaaaatttaccatagcgtaacagctgaattagagcttccagacattttttctctctatatagtaaattaaaaaaaatgtaaaaaacttgaagagataattatggcatagtggttttttttttctgcagatgtgtagatgaattggaatctgtgctttcaaagcatggcagtcttaggaggctgtatttctaccatcaacacctcacagctgtgagtgtccatattccatcccacctaattcatttcctcaatttctctagaatgatgcctagtttatatgttattactttaaccttagggtatgaaatttgaaatttacaagtcactttagtttattttccattttaacccacactatgttcctattcctatataaggtttttagaaacaccatgtttggtccggaagggcgtcctcaacattgttgtgcatggcttgggatcgctagtagttttccagagtgtgcatcttcgattgtcccagaagaggtaaaaataaatccttggcagcagttttatactttgaatagtcaagtattgaccaaaattattaaaacactaactgcacattttgatggagtcatggagatactttatgctttttttttatggtgttactttgttgctttgttttgcttacatgaagacctgatcttcaaatattcaggatgtttactgcaacacaatcttccattttttgttaataattttgttgaatgaagatgaagaaacttgttattataaaaatagagttaatatacttatgtatctattaaaattctataagcttcatacaacttacctagatttttttttttagttaatttcaatttcaatttcaatgagaaggaattctcaaatggtttgtttaaagttacatagtcattgtgggttctgatgtcaatgcaaatccaaacttctcttattacataactggtcaaaactcaaaaagtataaataatggcatctacctttgaaaatgaaacctcatattgacttaacagtcatgtaaacttcaatgattggccataccattgctatccacaatggaaaagagcatttacctatttatataacagatcgtatgataggccataaattaggagaattttcacctactctaaatttccgaggatatgcgaaaaatgataatagatctcgccgttaacgttaattttaacataaatttttaaattgtaatttataacgaaatattagaaaaatggaattctttttaaaattatattcaaatcaagcatcattcatgtggaacggtgtgaggaggcaaagcatgaatttgctgcaagggacaaaaagcatgagatacggttagaagtgagaaagtgaccgctgaaatttttgtggcatattaatttaaacatcccaaaaccccaacaaaaaggggaagtcgaaattttttttcctactgcctaattgatcattaggtgttgtgtgatggtagcaatatgtggaaaatgtagaatataggtgttcactgtaaattttgctgcaagcaggttacaaaaatcggcagggatgctgttctttatgttgaatctctgattgaatctatcatgggaggattggaaggattaataaatattcttgactctgaaggaggatttggtgccctagagaatcaggtaaatacttttagttaacaagttggccccatttcagaaaactaacatttttatttcatcagcttcttccagagcaagcagcttcatatctgaatcagacatctagagtttctattccatcatataaatctccaaaaggaactgccggttttcctttacctggccatgagagctttcctgaaaataatggttctatcaaaatgtatgtcataataatatcatccgaaatatgtatgagtaaccacataatatatccttttaatttgtctactttttctaatgacaggttagaagctgcaatgcagaggttgaccaatttgtgctcagttttaaatgatatggagcctatatgtgttttaaaccatgtctttgtactgagagaggttggggatggatatttcttttcttcctcttttcttcatgagatttacttatctatcgaaaacagtttagataatgccttcaattgcataaaatttggctagtatgaaatctatgattgaatgggtatcgcccttttaaagaaactttgtagcatggctgtttaactccggtatataattaaactgaagcagtaaaaaagtcatggttgttttaatatgcaaatcctggaaggattgtaaaacagtaaaagtaggctaaaatatatttttcgtccctataaaattggaaatgcttgtttatcgtccctacaaaatttttagtatatttttagtcctcctaaaattaaaatatactactctttggctagaagtcaagctcggagcagtaacaaaatttttagggttagccacgccggtatggttattatccgagccaaagagtagtatattttgattttcaaaggactaaaaacatactaaaaatttgtagggacaaaaaatgaatatttccaattttataagaacaacaaacatattttaaccataaaagtatgatgaagatattaatgtacagcatattgatgatatagtggtagagaaataggtacaaggtgagtcttttcttaatggaaatgcacattattttttggatatggtgttagatatggatctaaattggaaataggtacaatcttttcttttttttttttttttgggggggggggggnnnnnnnnnnnnnnnnnnnnnnnnnnnnnnnnnnnnnnnnnnnnnnnnnnnnnnnnnnnnnnnnnnnnnnnnnnnntttccagaggttgggtggtttggggcctttcaaaaagtttaggagaaatagccattttagtccctgaaatcggaaggcactgtcacattagtccttgaaactaaaaaaatgtcaaataagtccctgaaagtgtaaagaccatcacatcagtccaaaactcaaaaaaacgtaaagtgataatatgaacattttattagtttcagggactaattgtgacaacatattccactttcagggactaaggtggctatatagtcaaagtttagcttaatctttccagtgatttggggctgtaaggtgtgttcagtttgggtttttcaggtttgtaacctgggagcctgaagactgaactaaacagtattgggttgggtaaatgctaaaccaaactgattaagttatctgaaccaaaccaagttcttattcaggtcaggtcaattgggttcatgggttgagctgttccctcttaaattcctgattttgagggtcaaagtgcttataatattcaccgattggaaaattaaagtagattggcacatatccatgatctcttcccaatgcttgtattttataaaagtattaagttattgattatctcgtcaatgaatgctgcactttattcttcagtgcactactcaatttagaggatccagatccaacattatcacctgttcaagtagtgaatcagtgcatggaacccaagtcttatatgcatccactccctctatatcaaattgtgctgtttctgaagcaaatattgttcattctgccattattaacacatcaagctatttgtgcagtacatgagagaatgcattcttggcaacttcagaagaagattgcttggtgttctgaaaactgataacgatcttcaacggcctaccgttctagaatcactgattaagagacatattagcattgtgcatcttgcagagcagcacatcagcatggacattactcagggtattcgggaagtattgctttcagaagccttttcaggaccagtttcttctctgcacttgtttgagaagccaacagatcagcatacaggatcagccactgaatctgtatgcaattggtacattgaaaacataatcaaggatgtttcaggtgctgggattttgtttgttccaattcataaatgcttcaggagtacaaggccagttggtggatattttgcagaatcagtcactgatctccgggaattacaggcttttgtacgtatttttggtggttatggcgtagacaggttagacagaatgctaaaagaacacacagctgctcttttaaattgcattgacacttcactacgctcaaaccgagatgtgctagaagcagttgctaccagtctgcatgctggtgatagaattgaaagagaagcttctgtgaagcaaatagttgatctggaaactgtgattggtttttgtgttcaggctggccttgcactggcttttgatcggctactagctgaggcttctggtgctatacttgaagaaggtgctcccttgatacattcgttgctggatggggtggttaagcatctacctgatggagtaccagaaaaggaagaaatcaggagaatgagaacagtggcaaatactgtaggtgttgttaatgatcatgattcagtttgggtaagatcaattttggaggaagttggtggtgcaagtgatggatcatggggcttgttaccatacttatttgccacattcatgacatctaatatttggtccaccacagcatttaatgttgacacagagggttttagtaacaatatccattgcttggcaaggtcagtatgcttgtaacttggcccaatgccagtagattaacttgcatgcagtaattctacagggttgtatctggaaattattcgtttagtattttgattccattgtctaaactaatactatttgagaaactgaactattcattgccattggcatatactaattttggtatttgtctaactctaaccacataataccgtgcaggtgcatttctgcagtggttgccggaagtgagtttgttagattggaacgggaacatcagcatcgacagtctttaacaaatggacatgctagtgagggaatggatcccgaattatcaagtcatatgtcagccgaagctagtattaagtccacactgcagttatttgtgaaactctctgcagatatcatactggattcttggagcgaaacacacaggtaaatatgtaaatatatatatatatatatatatgtatatgattttgttgaaacacaaatgactgtacacgtgtttgtaaactacattaattaggtaggcaatgttgcaatatattaaagtagaatttcacctgcggttttgcatcagtactcttttatccgaaacattattctttcatttgttagttatcttatatattttgtattttgatttatacacagatctcatctcgtagcacaacttatcttcttagaccaactttgtgagatttcaccgtaccttccaagaagctcgctggaatcccacgttccgtatgccattctccgttcagtatacagccagtactatgcagatactcagtccactccattggcaatactgaatgcatcaccccgtcattcacctgccgtgttgctcgcgcacgcttctcctgtcttaaggcatcatcgtggtggagactcaccacagtattatgggcacgaatcagggtacttcaaaggatcgtcatcacagagccaggagcacctctatgatgatattggcagcttaaggagtatggacaacaagcaaagaaacgttcgtcgttccgggcctttggattacagtgccagccgtagtagggtaaagtctgttgaaggctcaacttctggaagcactggccccagtccacttcctaggtttgcagtgtctagatctggtccattagcgtacaagtagtgagttgtttgatataatacccaacagaagctggtaagttattcaccttctgctagtgatcagttgtctataaagcgtaaatcatccaaggtttgcacaaattttagcaaatgtatatcgcacttaagcgtccttttgtaatcgcctgaatagtttaaatcaatgccatattaagttcctactgttttagcgagaaccaggtgttcattctatttaatgctcgtataatcttgacatctcgcagcttgaagtctgtttgcagaggtattatggatcttattaagtaatcaatattcagtaatgatatttgctcgttattattattattattattttttacttcattatcttttagataataaaacaacaaaggcatacatttctaaacacatcagtggtttactctatcaagaaaatgccgctcgagtacaagtgtgtttggttacacgttattgaagtgatttctagcgttttctgtgaagcttgcaggtataaagctagcaggtataatttcccatgtttctttatgggaaatcgaatcgagtaactttttgttctcaaaattattagtagagtttaatataaatttaaaaaatgtaataacattcagccaatcacaaaccatgttgattttgatgacaactttattaagcatgattttcaattatttgataatataaaaaaatttatattaatagtacatattaaactttttaataatcatcaaaatatcattattggttgtaatatgtctagatatatattataagtttaaatatgttaaaaattcctaataaacgatcgaattttatattagatttttgataaattttttcattgttgaatcccttgttttgagtatttgttgtcacatgatgtgatggtagagactcaacataagttttaatatatttaacactcaacaacgaaaataattattaaagattcaaaataaaatttagttatttaattgagaccttaaatatattttaagtctacattatattaatcaataaatattaataaccattttgtaaaagtaaatttgaggaccaaaatctacatattaaaaccaaaatatatatttataaaaacttgaaacagagtattagtaaaatttcccatatatcactctttttatcccttgtattctaaatcattcatttgttttgtgtgataccactatggtaaggatcctaatcctcataaatgacaaaatgatgaacataacatggaaaatatataaattgataatagattttaatagactatttattaaagaaaacttacttaaatagtctttgaagatgatgaatatgcaaacgaagaagggaaactttcataatggtcttaaaacacaagatttatttaatctttcaaacagcttctgcctttctcattaacaataggcatatttatagtacaactaagaactatatagatgagtccagagcataaaagataagattacacaatattactggccaatcacagtttgtacatctggcctctatctttgacatacataatcttaaaacagtaaaacaaataatacacactccttatttacataatagaatttatccttaccgatagctttgtcatttctgtcgacactcctgattggctaaagggtcttgtcttcttttacttagataagtcttctttgttaaagtaatccaacatttccttatttcgcaagtaaggatttgactgggtgttgctgccttcatctttaatttttaatgaattattactgaggggtcctcccaaagtcttcatctttattagtctttcttgaaattcctcttgatatgtcgttgtggcaagttttgccattatctgctttttctccgctaaaaataatgtttctttatccaattgagaagtttcttggggtttggaaattttgtttgcttttgcccaattaataattttttctctgcttaaaaggttaagatcaaactttttccaccatttcactttaacctgtcttgataataaacatatatctgtaacttcatctaatcttgaataagtgtatgtcgaagtcattatccatgtaattccttgggatgctatgaacgatatgaactgatatccttgcatgaaggtagtttgctctttgaaaaatatatatactttttctactggttgtgagaaaaggcttctggttggtccaaaatcccaaaaccattttatgaaccattttggaaattttaatgatagtcctcttttaaaccaaataaaccatgaatgtttatcaggtttgaagtataacatcttgtaccatgcatccatgtaatcgtaatggttgtattcttctggattaaagactcttgaaaacttcttaggagcaaacaagggttgtccccaatcttgatatgataggatattcataattctgatcttggagaattgaatcactccggttgcatctttattgtgtttaatttctatggaattagtatctactaaaataaactcgtaaaaagttgtctttaagttcatgagttataggatattggatatgctcggggaaaattttattggctaattcaacaggattgaattttaaccagggtttttcagatactagtattggaattacttcttctttttcaacataatcagggtcattttctatatcagttttgaaagtggaaggggtatatgatttttggaaatctctaggtcctactaaggtattgaaatattgcaaaggttggtatttgtctgtaattatcgaaggtcttggaactgatcctattggaggtcttggaggctgatatataggattattttttactatttatgcccaggtagtaatctccattttggaagtactagtatggggcgaagcccgtattgacttcttctctttatatgttcccaatgggggaccatattgatctttatccattttgatttcggaattttctattcttttgctcatgttgagccctgtaaaaattctctggttaaaaaatttggtaaataatttgtttctccttttatatgctaaatatcaaaatcgaaacatgataataagcttgacatcttgcaaaaatatgtttagaaaccagatttttacaatttgttttggtgactcttgggttattttctacttaagaattcctccataacctaaatttgaagcatatgtttatgctatcaagaaggcatctggacctgggattcctaaaaaatgaagtttcttagctatatttttcatttctctaactgcttttgtaatctcttctgaccatcccagaggggttttctttaatctctcataaaggggtgcacaaattatcctaatattagggataagatctgctatataatttatacatcctagaattttttttgtataaattctaatgatctttgtattggagttaagttcattggtatatttcatatcctaaaaatctaatttttgtttcaaatattttatctttctttccaaaactactaattcattttctttaaaaatttcaataaatttttctaaatgttctatatgttgatttattgatttagaaaagactaaaatatcatctaaatatactatagtaaaatctaaatatttataaaatatattattcattatgttttgatattcacttggtacattttttaaaccttggagcattacattccattcataatgtccaaaaggtactacaaaagttgttttatacttatcttcctctctcaccgaaatttgataatatctagatttcatgtcaaatttggagaaaatagaggaattatttaatcttttattaggtaaagggtacctaatccattttagaactttattaagaggtttataattgatgagtattcttggagcgccactttctacttctgaagctttcatcacataaaatcatgaacaactccaaggagattttgatgatctaattaatcctttatcaagatattcattaatttttttacaattttctaaatattgttgattcatttgtatgtgttttattgttatatctttttcgctaaaattatctatatatggcaaagatacattcattaatttgtatataggtttatcctttgaatttattaatggtttagtacctgaagtactagcctcattttgtaacgacccgcctcgtcgctacggtatcactactctaaacatgtaatctcatttttttaatgaaaactccattaatttgattatggtaatgatagtaaatttttggcgatactacactcacccgacattgcacaaataagtaaataaataaatatacatatatcaataaattgaaccacatatgtcattcacatgttagaacttagtttacatatatttaagtttggaatttacacgctcaaccaaaaagtatttaagaaaccaacaaagaaagagttaataacaaagcatgactttctaccacaatgaattccaacgttatcacgtcggtttgacggctccaacaaaaagaatctctctccaatatcatctattgttgttcatatgcttccacgaacgaaagttcgcaatcaccacaagtaccaaccaccacacggtacaaaattgcaagggtgagtttattatgcaaaatcaacaagttccagataacaataaatagaaagaaagcaacaataacaaccacaatcattctcagtaatcaatcagttcaacatccgttcaacaaactagtcatcaactttttccacaattcaaatcaattatgctcagaatgatgcatgcacctaactcaactctcataatgcaatgtggtatcattcctcaggaaataacctaagcgtgcccacatgacactctcacttaggaaaatgattcagtagctcgtcgaggtcaccttgtcgtgcacaagccgctccccccatggtgagcagccagagtcacaagggagttccaaacaaagtgatatgcccccaagtacccccggttcttactgccaccattctatttccatgcaattatgaagtatgaaacatggacaccatcaatgcactgaccacggatagagaccggaatcttaagcaatcccttttcctaaggatgcttaaaattttttaaactcttcctcgcaaggatatccaataattcatgcacctccatgtacatacacagtatacaaacatgggctcatcaatgcactgaccgtggatagagatcggaatcttaagcaatcatttttcctctttagggatgcttaaaatttgtaaactcttttccacaaggatattcagtcatgcacccccatatgtatacacaacatacaatgacattgtcaacattaacattatctctcatcaatgtcattatcaacatcatctcatctcaatgttatgatcatcatcaatatcatttcaatctcaatgtcatcaacaacatcaacatcatttcatttcaatattatcaactacatcaacattatttcatttcaacatcttcaacatcaatagaatctcaatctcaatatcatcaacaacatcaacatcatttcatttcaatatcataatcataaatatcaatatcatctcatctcaatgttactaacatcacaagcaattgcattccacatatatacatataacacctatctgagattcacattccccaagtcttcagacaacacaaatctcatacattcacgatccataataccacgagattgatattttaggaaaattctaaattaaagaggaggactacagtatagaaaacacactcttatgcccatttaaaaatttaataaaatattaaataggagaccatattataaaattttaggcagagtctcctttgtaatcaagacttttttcaaaaattcaatcattagaacaacatcatttacagttttatctatcaataacaaattcatcgcatcccattagttaaaaacacattttttcttgaaaacgagcacacaacaggaacaaacatacatcaatactaaatatatcacatctcattagtttaaaacatagtttttcttgaaaatcaaaacacaacaggggcatgcatacatctccataattgagttctctgacctccaactgtggtatcaaaaactgtaaccaaacaataaattctcctcacatatctatttccctctgttagctcctagtagcgtcgttttgagctctctcaagttcacgtgctttggtccaaacgcagagctctatataccaaatcaaagataatttaatatagatttcaaagacaaagttaatattaacatttggggtcaaatacccaatcaaatttaaaaaggggctaaaacagtgttttggaaatccacatcaaaaggacatcattttgaaattctgatcacaccaatgtgaacggggctcaacgaaagtcacaaaaatgacatcaatattataaaaggaaactttcacaacatctcattttcaaaggtctttcaaaggaaatgtaaacacacccaataacggtacctaaatcacaagagataccaagagagacttcatactagttaggagaagatatagaaaacacggttacctcgaagaaaccgcgaaaggaggattggaggctccattctctatcgaatccatgagttgagttttgaaaattctgctccgattaaagtgttcctctccgtgcggtggttcaacggcaagaaacgatggctcgtggcgatcactggtggtcgtggctggtggaagacgagggggaggggttgggtggctgttttgaagaagaaggaagtagaattttcgtgttttgacgctgctgcaccacttatagtccactttactcgtccaggcgaatttttactcgcttgagcgcgctgacccaatttttgaaattttactacttttgtgaaaaattaatatctcatgcttcagatgttattttgtaaatcccagcggtcaagatttacatatgtgggtacgaaacgtacctttaaaatatgaagtcgatccaacgattaaccaatccataataaattctcctcacatatctatttccctctgttagctcctagtagcgtcgttttgagctctctcaagttcacgtgctttggtccaaacgcagagctctatataccaaatcgaagataatttaatatagatttcaaagacaaagttaatattaaaatttggggtcaaatacccaatcaaatttaaaaaggggctaaaacggtgttttggaaatccacatcaaaaggacatcattttaaaattctgatcacaccaatgtgaacggggctcaacgaaagtcacaaaaatgacatcaatattataaaaggaaactttcacaacatctcattttcaaaggtttttcaaaggaaatgtaaacacacccaataacggtacctaaatcacaagagataccaagagagacttcatactagttaggagaagatatagaaaacacggttacctcgaagaaactgcgaaaggaggattggaggctccattctctatcgaatccacgagttgagttttgaaaattctgctccgattaaagtgttcctctccgtgcgatggttcaatggcaagaaacgacggctcgtggcggtcaccggtggtcgtggctggtggaagacaagggggaggggttgggtgactgttttgaagaagaaggaagtagaattttcgtgttttgacgctgctgcaccacttatagtccactttactcgtccaggcgaatttttactcgcttgagcgagctgacccaatttttgaaattttactacttttgtgaaaaattaatatctcacgcttcagatgttattttgcaaatcccagcggtcaagatttacatatgtgggtacgaaacctacctttaaaatatgaagtcgatccaatgattaaccaatccataattatgattttactaaaacaggttttgggtcaaactcggaatcacacattttcaacaccaaccaatcaaactccgcctaacctaacattcacaccaaacagttgcacaagaataatttacacaataattcaattaatcaaataatcaaataatacaagaaatacatcaaacatattttttagttatcaaaatttcaaggccttacacattttggttgttttctattctatttaaatgtgttgacatagtatttaacattatattagaatagtttaattggtggtgtatttttctaatatcttttatctttatacttttattttcttgtataacatctttaaaggacagccaatactagatgaacatataagaaaaaggatataattttatacatttaggattagtccaggtagtggcaaaacctaattatagattaagaatgaacaatccaatattaatgttattaagagatattagacttaaaaaatttaatgactcaataatagaaatattaaaaagtaattttcataatggtccaaccttctttaattgcttccctaactttgctatgaatcttaataatgaatttactagtaaagccataaaactgcatgttcaattaccaaatgaaataacaagagaagcataggagcaatacatatgatttttagaatatattataaagtaactaaaatagattataattttagagctttaagatcatctcccaaagatgaaacaatattaatagaagctaatagtaagaaatctttagtacatgtacctaaaaaattaatacatgaaaacattataaataaaataccaannnnnnnnnnnnnnnnnnnnnnnnnnnnnnnnnnnnnnnnnnnnnnnnnnnnnnnnnnnnnnnnnnnnnnnnnnnnnnnnnnnnnnnnnnnnnnnnnnnnnnnnnnnnnnnnnnnnnnnnnnnnnnnnnnnnnnnnnnnnnnnnnnnnnnnnnnnnnnnnnnnnnnnnnnnnnnnnnnnnnnnnnnnnnnnnnnnnnnnnnnnnnnnnnnnnnnnnnnnnnnnnnnnnnnnnnnnnnnnnnnnnnnnnnnnnnnnnnnnnnnnnnnnnnnnnnnnnnnnnnnnnnnnnnnnnnnnnnnnnnnnnnnnnnnnnnnnnnnnnnnnnnnnnnnnnnnnnnnnnnnnnnnnnnnnnnnnnnnnnnnnnnnnnnnnnnnnnnnnnnnnnnnnnnnnnnnnnnnnnnnnnnnnnnnnnnnnnnnnnnnnnnnnnnnnnnnnnnnnnnnnnnnnnnnnnnnnnnnnnnnnnnnnnnnnnnnnnnnnnnnnnnnnnnnnnnnnnnnnnnnnnnnnnnnnnnnnnnnnnnnnnnnnnnnnnaaagaatggattagaatagattttatgcaagattataataaagactatagaaaatggtatttttctacatatagtaaagaagagacaaaaaactttagaaaaaatattataattatatggaagaaaatgagattaatgtatacttttttgattggttctttaatatacaagaaaaagctattaggccaataattaaaaatgcaataacttggaaaactacatatgataacataatagaatatgaatatcctccttaaagggagaaaaattacaattaaaagatttagaaatagaggcatctccttttaaagatgttataaaagaaaataaaattatagagataaaagatattagaaaaatacaccaccaattaaactattctaatataatgttaaatactatgtcaacacatttaaatagaatagaaaaccagcaaaatgagactagtacttcaggtactaaaccattaataaaatcaatggataaacctatatacaaattaatgaatgtatctcaaaaaaaattagactttataaaattaggaagtcaaacagaaaatatgatagaagaatttaggaaaaatttagaaaaattaagtataggaaaattttccataaataccattcaagaagatacaaaaataaataaaatacaaaagtattatccaaaaatgagaaattattattcaagactatctcccgcatatgttcaatttgaagaaaaaggataattagtacaaaatgtattctcaagatcaaccattaatgaatggaatcttgatggtatgagtgaacaagcagttttagatttaacctgtcaaatgtcaatggtagctactgcttataagacaaaagatatatcagatagaaatgccgccataaccatagtccaaacaggacaattaaaatgatggtgggataatttgtgtacagataatgatagagctataatattaaatactgtaaaatcagcatctcaggaagaagatgcagtatcaacacttatatattcaataatacaaaactttattggtgaccccaatatatttaaagaaagagtagacaatcaattaacaaagttatattgtccaacaatgtcagattatagatggtataaaaatacatttttatcaaaggtaactctaagagaggatgggtttgcaggattttggaaagaaaaatttgtagctagattgcccaaattatttgcagaaaaagttagagaaaaattagctagacattttcctnnnnnnnnnnnnnnnnnnnnnnnnnnnnnnnnnnnnnnnnnnnnnnnnnnnnnnnnnnnnnnnnnnnnnnnnnnnnnnnnnnnnnnnnnnnnnnnnnnnnnnnnnnnnnnnnnnnnnnnnnnnnnnnnnnnnnnnnnnnnnnnnnnnnnnnnnnnnnnnnnnnnnnnnnnnnnnnnnnnnnnnnnnnnnnnnnnnnnnnnnnnnnnnnnnnnnnnnnnnnnnnnnnnnnnnnnnnnnnnnnnnnnnnnnnnnnnnnnnnnnnnnnnnnnnnnnnnnnnnnnnnnnnnnnnnnnnnnnnnnnnnnnnnnnnnnnnnnnnnnnnnnnnnnnnnnnnnnnnnnnnnnnnnnnnnnnnnnnnnnnnnnnnnnnnnnnnnnnnnnnnnnnnnnnnnnnnnnnnnnnnnnnnnnnnnnnnnnnnnnnnnnnnnnnnnnnnnnnnnnnnnnnnnnnnnnnnnnnnnnnnnnnnnnnnnnnnnnnnnnnnnnnnnnnnnnnnnnnnnnnnnnnnnnnnnnnnnnnnnnnnnnnnnnnnnnnnnnnnnnnnnnnnnnnnnnnnnnnnnnnnnnnnnnnnnnnnnnnnnnnnnnnnnnnnnnnnnnnnnnnnnnnnnnnnnnnnnnnnnnnnnnnnnnnnnnnnnnnnnnnnnnnnnnnnnnnnnnnnnnnnnnnnnnnnnnnnnnnnnnnnnnnnnnnnnnnnnnnnnnnnnnnnnnnnnnnnnnnnnnnnnnnnnnnnnnnnnnnnnnnnnnnnnnnnnnnnnnnnnnnnnnnnnnnnnnnnnnnnnnnnnnnnnnnnnnnnnnnnnnnnnnnnnnnnnnnnnnnnnnnnnnnnnnnnnnnnnnnnnnnnnnnnnnnnnnnnnnnnnnnnnnnnnnnnnnnnnnnnnnnnnnnnnnnnnnnnnnnnnnnnnnnnnnnnnnnnnnnnnnnnnnnnnnnnnnnnnnnnnnnnnnnnnnnnnnnnnnnnnnnnnnnnnnnnnnnnnnnnnnnnnnnnnnnnnnnnnnnnnnnnnnnnnnnnnnnnnnnnnnnnnnnnnnnnnnnnnnnnnnnnnnnnnnnnnnnnnnnnnnnnnnnnnnnnnnnnnnnnnnnnnnnnnnnnnnnnnnnnnnnnnnnnnnnnnnnnnnnnnnnnnnnnnnnnnnnnnnnnnnnnnnnnnnnnnnnnnnnnnnnnnnnnnnnnnnnnnnnnnnnnnnnnnnnnnnnnnnnnnnnnnnnnnnnnnnnnnnnnnnnnnnnnnnnnnnnnnnnnnnnnnnnnnnnnnnnnnnnnnnnnnnnnnnnnnnnnnnnnnnnnnnnnnnnnnnnnnnnnnnnnnnnnnnnnnnnnnnnnnnnnnnnnnnnnnnnnnnnnnnnnnnnnnnnnnnnnnnnnnnnnnnnnnnnnnnnnnnnnnnnnnnnnnnnnnnnnnnnnnnnnnnnnnnnnnnnnnnnnnnnnnnnnnnnnnnnnnnnnnnnnnnnnnnnnnnnnnnnnnnnnnnnnnnnnnnnnnnnnnnnnnnnnnnnnnnnnnnnnnnnnnnnnnnnnnnnnnnnnnnnnnnnnnnnnnnnnnnnnnnnnnnnnnnnnnnnnnnnnnnnnnnnnnnnnnnnnnnnnnnnnnnnnnnnncaatatattaagtttaataacaacccattaatgacattaccaaataaccctaataataaaagaagaaaaatttgattttatagcattaataatagattcagcagcatatataaattgtatacaagaaggattaatatctactaaatattatgaaaaatctatagaaaaaatatctagtgctaatggaactaaaataaatattcaatataaattgtcaaatgcaaaaattagtaaaaataagatatgttataatacttcttttgtattaataaaaaatatgaattgtgaaataatacttggaaccccttttttaacttaattatatcattttcaagtaattgagataggattaaaaataggttttaagacaacaaataatttttgaatttataagacctccaaagagtagagaattaaatatgttaaaagaatcatgaacaagtttaatagataaaaagataaaacatatgaatttgttaaataaagaaatacaatttaaaagaatagaacaacaattagaaaattcgaatataaaaaataagaaattacatatatatatatataatgacaataaataatacagcaaagaaaagactctaatgagtcatttttatagaattagctaattaatctcgggcactaaatcgtatgtttactgaagctgaattctaacacggtctggactcgagctacttttctagtccattaagtcttggtaactcattaaacgcaccatgttctttccttgcatttactacaggactcgcagacaacttccaatgccttccaggcagaatgaaaaagctatggaaggtccaatttggactatcttcatagtaaagaagctatcctttcttgcgtcatcagcttgatatcagaatcgctgtacgtacaacttgtggtacggacttcacgcgggatgtttccgagctagattgcaaaaccgaaagccgggggaaggggtttgtttaacatcaagactctggcagatcacagttgtaggaaaactaacagattatggcctaggaaaacttacagatatgaccataatcgccaacatctgtcgataaaaaaaaatggtcgtaattgtagttgcaattcaatttaagactttaaaaactgcaatttggcctctcttgtaatagaaagatcacattacttttttcattgtttacaaaccaatgagttatcccttttgaccattataaacaaaaaagaaaacaaacatgataaatactcggtaaaatattttaaaagcttcacagcctaagtgatcctaactctttgggagaactacttaatccgtttaatcatatccctattgggagccagatgatatgaggaggatagagctcctgtttgtgtaattaaaaaaaaaaataccatatggtagccactgtttctggcaagctaagtaatataaatgtgaaaactatctatcttcaaatggtagtcatagtaataactaattagcatccttggctcaacaagttaatacattctgcaggtatttcagttaaagacaagcaagaaacaagttctgggaaacaagtctgatatccttctaacagaaattaatcaacctccccgcatatgtgcacctagctcaccaaactgatcatcggcctccactgtatcttcagatagccgcacagcatccaacttctgcttgagaatttctatggcatttagaaccaattgagaagctttaactgctccggtagactcaacagtgaatatgaagctatcctgcctcgcaatgatttctacaagcccaggcttgcccatagcttctgctttcttaagcacctcatcatcatatgtgtatgcctcagcatcaaccaccatgacctaataaatgccaaaatacatagtatgataaatgacctcaagacaacaccatctgattttgaagggtagcaaatttaatacttttgttcaacaatacataatatatcaaagaatgactcaagacaacgagacaacacatttgattttgaagggtagaaaaatttaatatttttgttcaacaatgcataatatgtattaaaggactcgtaatcaaatgtgtattgtgtattggacaatacataatagaacctataaaagggtattaactaccaggtatcatcatttcaaaatagacaaaaatatgtataccactaagtggttgacagaatcagccaggtagatcagacattattttaagaactcttgatgttcccggatatgctatacatccaatgtgtatcggacaatacataatagaacctattttttatttttatgttttattttatcagcaaaaagtaatattattataataattagataagtacaagtggtactattatatttacactgttgccctactgtgtgtaggcctctggagtcctaatacaagctgtattgcaagaattaggcatccataggtctggatttgtctagatacccctccacaaaaagtaacctataaagccaaccccccgagtacaaaacctgacccttatattgctagcccgagaatggaaagggatatcaaatcctttttccaaatttttgagccataacctgcagaaacaaaatggcatcatccatcagcttttgactgttgaaacttccatttgagaaaacaatcatgttcctatgataccatatgcaccaagtcaaagaaatccaccatgtttgccatcactgaattctgatacccttgagataaccgtgagaacgctgaaggaagtgatctctcggcgcttccggggaaacgccgactatgtttagccaagataacacttcccaccataaaggcaagattttatcacagctaaagaaaaggtgtgacatgtcctcctcactggttctatagaatgggcaaatatacgttattcagatccacatttctcctcctcagattaatctttgttggtagcctattccgaatcaacctccaagcaaagtgtgatgctttacttgggactttgagtttccataattcattgaacacggcatcattattttcatctgacgaaaatctactgagcagtttgtaagcgctggccactgtgtatctcccactaggatccatcccccaacaccaactatcttgctggttagtttgtaataccaccccctcgatgtccttcatgaatttggcaaccatgcctatctccatttccctagataatctccgccactacagctgccattcccatccactgactgatgcgacccccagctactggacaaattgatgctgttgttgagatatgctatacatgagcagatatttctccagcaaagaacaccctccacccagccatccatcttcccaaaacttcacctttgatccacatccaattttccattttatcccacttctgaaccatctcccttcctcaaatgacttgcaaacaatacttaaatcccgccaccaaatagaatatctattgttccttcttgattcatccagactcctccaacttccatatctggagtccaatactttcgcccacaattctctccctgatgatggaagaggttccatcggcattttccaagtaaaacataatagaacctataaaagggtattaactaccaggtaccactattaagtatcacatatcaacatttcaaaatagacaaaaatatgtatatcacttagtggttaacagaatcagccaggtagaccagacatcattttaagaactcttgatgttcccagatatgctatacatccatcatcatgagctggattgcaaaccttgatactaaggtcttaattactgtaaatttctttgtatctcaaacttcattatgaaattgatagttttatgacctgatcgatcttgatgcataaatccttcacattaattctagccatgttattttgggggggccaaccttatagaggatatcaagtgtgtttgggattcagaagaacaaagaaaaggagtgatgggtaggtgtcactggaaaaccactgaagatgggtggatccggtggcacaaaatagggtgaggatgtaggtcacaaagtgggtctcaaacagaatagatgagaagctagggatcccttgtgttagtttcttctaacgttctgataaagagtggcaatgtcaactttggcctataaaattccccaagagggaactgtttcaagggtaaaacaaggattttttagaaagtcctcaacaaagggggcactatagggcagcaaatgactgcttttgggactgattgcagcaacgacagccacaaagataaaacgcaccacaaatcaattctctgctagcacactattaataactgctcgagttatgtaaagtcttttccagaatcaagtacaagtggttgtaaagaccttccacaattattgcatatgcggttgttcactttccccaattttcagggttgacagaagaattttgcttttaaactaccttgagattcctagtgatggaggctacattaccttgagattaggagtgatgaaggctacctaaaacaacttccctctggctcaaaaagattaatgaaaaaaagcataaagtttaagggatatgcgagtgctaaggtcatgtatatttgaatagcatccttactccaagataaaccatgaactttacaaaacattatcactctaatgcttattctctggaaggagatataatattttccaggtggccacaaccaaaatatgaagaatagttgtctcttagttttactgcatgtgcactctctatgtgatactgtaaagcctatcttagaggctgtttctataaacaactaaaaaaccaatctcgaagattgcttacgttgttcacaagaagaattatgcattcaaaacatcaaattactaatgtccatcattaaacacataaaacaatatacctctaatttcactgtctactccacttcaatccaaaaggttaaagagacatacaatgttcaggattagggattagcataaaatcgcaaggaaagtaattgacatgcaaatgttaagataaattccaaaaaataaatatatgcaccactgtaccagaaattaatcaaactaccatttaatcatcaaacccagaagaagagaggctaggtaattattaattctgcacagaatatggatcagataacactagtgaacaaaatcataagagaacaaacgataaaaaccgaacctgttgtgtcactggatcaatttcaaagacacgggttggactactgtcaacccattcccttttctcttccagagtcaaggtctccatcaaatcctcatttatatgaatctcgggttcatacatgaaagtgacagttgcagcaggtgaccatttagcatgatccttcccaatccccttcctagcaatcgctcgcagcttcagctcttgtccgcgtctcaacttcacaatgataatccccctgaatacacagttgaaaacaaagaacacccataagaaaaaaataaaacaaatacccaattgaaaagaaataacacccattcgaaaaaaagcaaaaacaaatacccatttcaaaaaaccaaatacccagttgaaaacaaagaatacccatttaaaaggtcaaatacctagttgaaaacgaagaagacccgtgtgaaatcgatgaatacccatttgaaaaaacaaaatacccatttgaaatcgatgacgacccatttgaaaaaaccaaatacccaattgaaatcgatgacgacccatttgaaaaaatcaaatacccagttgaaatcgacaaaaacccattttaaaaaactaggttttcctataataaaaaaaagttgaagaaacgcgcctgttgttgtctggggagtcagtggcagaggggtcagagaaatcaacaggactcacagtagggtcagaactgtagagatccttgctcgtaacatcgagggtctgatcggtcatgcacttaaccctaagatgaaactccacggagcaaaactcgcactgtccgtcaccgtcgcaggcgtcgcagtcacgtgagaagcgcatggacatggcgcgctcgctcgtgaggggaatgaggccgagcctgtgcgcgatgaactcgtcgttgagcacggacgagttgacctcgatctccacgaggtcgatggcgaccgtcggcacctccgcgatcatcacgcgccgcagcgcgttggcgatactcgcgtcggtgtcgcggagctcgaacttggcgtagtcgtccttcagctcgcggattttgacacgaggcatgcgcgcgtaggatactcctccctccatcgtttcgtttcttctcacactctctctgtttctgtttcaccggagaacgaataaaatgtaaaacccttctctaaaccccccaacgttcgggtcctttagtctaacttaatatattcatcaccccttccaataatatattttgcagggatcaaatcagatttttttctcacaaatcagcctattgtaaattcagcttcacccattggatagtggacagtcactatataagaatgattttgataagaatgtaaatacacaaaaatatcaaaaatatgaaatgataacaaattattctctgaaatatgtaaaataaatttagtctatgcaaaaagtatgatggattgatccgtatattaattgacaaattagtttcttaattttataacttaacatcaaattggttcttaaaaaatataatttattgtcaaaatgatcattgaatatcataatttaatgataaaatattctcacatatttaacacaagacaatcgttacactttttgtacatttagggataaatttaaatttttcatctttcaaaaattaatttgttactatctcctacttctaggatcaaaattgggtatttactctaaaaatatttaaattataaaagtatctatggttaatgtaaaaaattaaataagtatttcaaatttaagaaaaaaaaaactaaatttaaaaaaatgaaagtaattaatttgacattatatttaattagattggtttatgagagagaaaaaataggaagaaaattccatttttagtttttttcctcttcatcttccttgttctttttttttcttttcttttatcttatttcccctttctcttcctttccctcttccactatttttttaaccttatcgtatctatcattgggttaatttattgccaacttcaattaacttgggttaaatgtgctattaatgttgatgtttagatgggtataaaaattaaatttttttggataatattaaaataagttgaaaagtaaaaatgacatcatcaaattaatcaaggatatgtacgatgggactaccacaaacgtgaaagcttgtaatggaacatcaaggtatttccctatcacggtaggtgttcaccaaggttcagctcttagtcattatctctttaccttagtgatggatgaactaacgaaagatattcaagaggaagtgttgtggtgtatgctttttgcagatgatattgtgcttattgatgagaccaaagatggtgttaataggaaattgaaattgtggagaaacactttgaagtctaaaggattcacgataaccaagagcaagatggagtatatgaagtgtaagttttcgagagtaagagatggtgatcaagacacagtgcatctacttggtcaagaagcatccaagaaagatgtttttagatacttggggtcaatgttgcaaaaagatggtgagattgatgaagatgtaaatcatagaattagagcaggtggatgaaatggcagagtgcatcagggcttttgtgtcctcttaagctgaaaggaaaattctatagaacagctgtaagaccggtaatgctatatggaacggaatgctggtcagaacatagacaacatgagcataaaataggggtagcagaaatgaggatgttaaggtggatgtgtggatatacgaagatggataagataaaaaatgaggatattcgaagaaaggtaccaatggtaccggtatatgaaaagatgagggagcatagattgaggtggtttgagcacgttataagacggtcactagatgctcccgtaagaacaagagtttgttaccaagagctcgacacaaagagaggtagaagtcgatcgaaacttacctggggaaaggtagttaaacaagacctaatggagtgggatatagattgacggacggtatgtcttaggacagaatggagaaaaactataagcttggtggagggttaaacccattagttgttctatgttccagtcatttccttgttttaactatttttctcttcttttctcccttcttcctttcaccattttttctctcttttgtcttatttccacttttttcttccccttcccctttctctttctgtcacatttatgatttatcattagattcatctaccaccgaccccaattaacttgggttaaaggtgttgttgatgttgatgttgatgttgaatattaaaataagttgaaaagtaaaagtctttattcgcctagttaaacaattcttgaactttggattcactcatgatccacatcaattcctttttatttcctaaatttcaagtcaaatgacatcatcaaattaataaaaatgaagtaaattttgtttatctcgtacactccaaatgaacatcatccattaagaatgtgaagagtttaatatgtctagatcacactcttatttttaggcttactcatatatattaagttggctttttatacttagaagcatatgtggtatttgatgagtatggattcttttcactttgagtttgaggtatattttgttgtgtttgtgttggggttctttgttttttctaatggatttgtattgtgatttatgatttgatgggcatctcttttactagtattactttggtttgcatttgatattatttggcaattgtttgtaatacttctaggtgcaagacattttttttattctccttgtgtataacttatcattcaattgttactattgtcattgtagtggttattatatatatagagagagggagggggcatatcttttgtcttctttttttattcatttttcttctattaaaaaacttaaaaataatcnnnnnnnnnnnnnnnnnnnnnnnnnnnnnnnnnnnnnnnnnnnnnnnnnnnnnnnnnnnnnnnnnnnnnnnnnnnnnnnnnnnnnnnnnnnnnnnnnnnnnnnnnnnnnnnnnnnnnnnnnnnnnnnnnnnntttttttcaatagaattttttttaaaatatatatatatatatatatatatataattttaagaaattttaaaattattcaatacattattatttctaaacacaagggactctaaatgaacttctcatgtacatgaatgtaacccactaataattggacacaacataaccacgagaaactataaaaattatttaattttaaggaattaaaccctgtgtgggagaaagtagaaagaagagaaaatgataaaaaaatatatgaaaaaattataaaaattatttaattttaagaaattttaagttatttcattcatttgtatttctaaaaacaagtgactctaaatacacttctaatgtatatgaacttagtctactgacaactatacataacacaaaccacaagaaattataaaaatgatttaattttaagaatatatccattgtgtgacagaaagtggagataagataaaannnnnnnnnnnnnnnnnnnnnnnnnnnnnnnnnnnnnnnnnnnnnnnnnnnnnnnnnnnnnnnnnnnnnnnnnnnnnnnnnnnnnnnnnnnnnnnnnnnnnnnnnnnnnnnnnnnnnnnnnnnnnnnnnnnnnnnnnnnnnnnnnnnnnnnnnnnnnnnnnnnnnnnnnnnnnnnnnnnnnnnnnnnnnnnnnnnnnnnnnnnnnnnnnnnnnnnnnnnnnnnnnnnnnnnnnnnnnnnnnnnnnnnnnnnnnnnnnnnnnnnnnnnnnnnnnnnnnnnnnnnnnnnnnnnnnnnnnnnnnnnnnnnnnnnnnnnnnnnnnnnnnnnnnnnnnnnnnnnnnnnnnnnnnnnnnnnnnnnnnnnnnnnnnnnnnnnnnnnnnnnnnnnnnnnnnnnnnnnnnnnnnnnnnnnnnnnnnnnnnnnnnnnnnnnnnnnnnnnnnnnnnnnnnnnnnnnnnnnnnnnnnnnnnnnnnnnnnnnnnnnnnnnnnnnnnnnnnnnnnnnnnnnnnnnnnnnnnnnnnnnnnnnnnnnnnnnnnnnnnnnnnnnnnnnnnnnnnnnnnnnnnnnnnnnnnnnnnnnnnnnnnnnnnnnnnnnnnnnnnnnnnnnnnnnnnnnnnnnnnnnnnnnnnnnnnnaaaattataaaaaaatatatttaattttaagaaatttaaaattatttaattcattcttatctctaaacacaagtggctctaaatatacttctattatacatgggcatagtccattgacaactagacacgacatacaaccacaagaaattaaaaaaaaatatttaattttaaaaatatatactatgtttgagagaaagtagagagaaaacaaatgagataaaatgataaaagaaatatataaaaattatttaattcatttttatctttaaacacaagtgactctaaatgcatttctattgtacatggacataacccattgacaactagacacgatataactatgagaaattataaaattatttaattttaagaatatataccttgtgtgagagaaaatagagagaagataaaaacagaaaaaaaaaataaagtgtatatagaaatttataaaaaaaattaattttaagaaatttaaaaattatttaatttaatattatctctaaacacaagtgattctaaatattcttcttcttagtgtgacaattagacatgacacaatcatggaaaattataaaaactattttatcttaattcattccttgtattgttgttatgttttatgtcaacattgattttatttatttaatcaaaagaaaatttccactcatgtttttattcattataaatatttatatttttgtgtttaaaattgattgagtaaatataatgccacatagaacaaaaaatataatgacacagagagttacaagttacaacctacttgctaggggtcatgattaggacatgaaaacaatgtttttaaggacccttgcaagtatgtaccaagtttattgaacaaagacactatatatacctaccttggtggctttcctcctcttacccccctgcttgatgagataacaattcaacctcacagaatttccaaggtgttaattcaagatctaattgtagaggccaacttcaaccttaaaattcaacaatggatcaacacatggtggctagaatccctaggaggtcctttcaaaaaggaccaatgaacctactaccaaaggtaatgacgacatgccttggggacactttcaaagaaaaaggaaaaattcaatgttatttatcatgacataaagagcagtctaaaaataataaaacaatagggctccaactatgcacccaaaaattattaatgtggaattaacatccaaatgcaagagaagaataatttccgtaacccttcatcaaaaaagggaattaatgttggagtttttgtttaaactctatgagttatgaataagaggcggttaacaattcaaaatagtaactacttataaccgctcttgggaaaggttagaaaaataactactcccaaccgctccgataaccaacggttacgatggtttatcgccaagagtcgcgatggttcatcgccaagagtcgcgatggtttactgacaactcttcaccagggttgtttgttgtctataaatagacacagagacagtcagaaaataagagggagaaaggaaggaagtagaaaactgatagttaacttcttctgatagtctcgcttagacactagtgcatttcatatcacataactctgtggttcctcannnnnnnnnnnnnnnnnnnnnnnnnnnnnnnnnnnnnnnnnnnnnnnnnnnnnnnnnnnnnnnnnnnnnnnnnnnnnnnnnnnnnnnnnnnnnnnnnnnnnnnnnnnnnnnnnnnnnnnnnnnnnnnnnnnnnnnnnnnnnnnnnnnnnnnnnnnnnnnnnnnnnnnnnnnnnnnnnnnnnnnnnnnnnnnnnnnnnnnnnnnnnnnnnnnnnnnnnnnnnnnnnnnnnnnnnnnnnnnnnnnnnnnnnnnnnnnnnnnnnnnnnnnnnnnnnnnnnnnnnnnnnnnnnnnnnnnnnnnnnnnnnnnnnnnnnnnnnnnnnnnnnnnnnnnnnnnnnnnnnnnnnnnnnnnnnnnnnnnnnnnnnnnnnnnnnnnnnnnnnnnnnnnnnnnnnnnnnnnnnnnnnnnnnnnnnnnnnnnnnnnnnnnnnnnnnnnnnnnnnnnnnnnnnnnnnnnnnnnnnnnnnnnnnnnnnnnnnnnnnnnnnnnnnnnnnnnnnnnnnnnnnnnnnnnnnnnnnnnnnnnnnnnnnnnnnnnnnnnnnnnnnnnnnnnnnnnnnnnnnnnnnnnnnnnnnnnnnnnnnnnnnnnnnnnnnnnnnnnnnnnnnnnnnnnnnnnnnnnnnnnnnnnnnnnnnnnnnnnnnnnnnnnnnnnnnnnnnnnnnnnnnnnnnnnnnnnnnnnnnnnnnnnnnnnnnnnnnnnnnnnnnnnnnnnnnnnnnnnnnnnnnnnnnnnnnnnnnnnnnnnnnnnnnnnnnnnnnnnnnnnnnnnnnnnnnnnnnnnnnnnnnnnnnnnnnnnnnnnnnnnnnnnnnnnnnnnnnnnnnnnnnnnnnnnnnnnnnnnnnnnnnnnnnnnnnnnnnnnnnnnnnnnnnnnnnnnnnnnnnnnnnnnnnnnnnnnnnnnnnnnnnnnnnnnnnnnnnnnnnnnnnnnnnnnnnnnnnnnnnnnnnnnnnnnnnnnnnnnnnnnnnnnnnnnnnnnnnnnnnnnnnnnnnnnnnnnnnnnnnnnnnnnnnnnnnnnnnnnnnnnnnnnnnnnnnnnnnnnnnnnnnnnnnnnnnnnnnnnnnnnnnnnnnnnnnnnnnnnnnnnnnnnnnnnnnnnnnnnnnnnnnnnnnnnnnnnnnnnnnnnnnnnnnnnnnnnnnnnnnnnnnnnnnnnnnnnnnnnnnnnnnnnnnnnnnnnnnnnnnnnnnnnnnnnnnnnnnnnnnnnnnnnnnnnnnnnnnnnnnnnnnnnnnnnnnnnnnnnnnnnnnnnnnnnnnnnnnnnnnnnnnnnnnnnnnnnnnnnnnnnnnnnnnnnnnnnnnnnnnnnnnnnnnnnnnnnnnnnnnnnnnnnnnnnnnnnnnnnnnnnnnnnnnnnnnnnnnnnnnnnnnnnnnnnnnnnnnnnnnnnnnnnnnnnnnnnnnnnnnnnnnnnnnnnnnnnnnnnnnnnnnnnnnnnnnnnnnnnnnnnnnnnnnnnnnnnnnnnnnnnnnnnnnnnnnnnnnnnnnnnnnnnnnnnnnnnnnnnnnnnnnnnnnnnnnnnnnnnnnnnnnnnnnnnnnnnnnnnnnnnnnnnnnnnnnnnnnnnnnnnnnnnnnnnnnnnnnnnnnnnnnnnnnnnnnnnnnnnnnnnnnnnnnnnnnnnnnnnnnnnnnnnnnnnnnnnnnnnnnnnnnnnnnnnnnnnnnnnnnnnnnnnnnnnnnnnnnnnnnnnnnnnnnnnnnnnnnnnnnnnnnnnnnnnnnnnnnnnnnnnnnnnnnnnnnnnnnnnnnnnnnnnnnnnnnnnnnnnnnnnnnnnnnnnnnnnnnnnnnnnnnnnnnnnnnnnnnnnnnnnnnnnnnnnnnnnnnnnnnnnnnnnnnnnnnnnnnnnnnnnnnnnnnnnnnnnnnnnnnnnnnnnnnnnnnnnnnnnnnnnnnnnnnnnnnnnnnnnnnnnnnnnnnnnnnnnnnnnnnnnnnnnnnnnnnnnnnnnnnnnnnnnnnnnnnnnnnnnnnnnnnnnnnnnnnnnnnnnnnnnnnnnnnnnnnnnnnnnnnnnnnnnnnnnnnnnnnnnnnnnnnnnnnnnnnnnnnnnnnnnnnnnnnnnnnnnnnnnnnnnnnnnnnnnnnnnnnnnnnnnnnnnnnnnnnnnnnnnnnnnnnnnnnnnnnnnnnnnnnnnnnnnnnnnnnnnnnnnnnnnnnnnnnnnnnnnnnnnnnnnnnnnnnnnnnnnnnnnnnnnnnnnnnnnnnnnnnnnnnnnnnnnnnnnnnnnnnnnnnnnnnnnnnnnnnnnnnnnnnnnnnnnnnnnnnnnnnnnnnnnnnnnnnnnnnnnnnnnnnnnnnnnnnnnnnnnnnnnnnnnnnnnnnnnnnnnnnnnnnnnnnnnnnnnnnnnnnnnnnnnnnnnnnnnnnnnnnnnnnnnnnnnnnnnnnnnnnnnnnnnnnnnnnnnnnnnnnnnnnnnnnnnnnnnnnnnnnnnnnnnnnnnnnnnnnnnnnnnnnnnnnnnnnnnnnnnnnnnnnnnnnnnnnnnnnnnnnnnnnnnnnnnnnnnnnnnnnnnnnnnnnnnnnnnnnnnnnnnnnnnnnnnnnnnnnnnnnnnnnnnnnnnnnnnnnnnnnnnnnnnnnnnnnnnnnnnnnnnnnnnnnnnnnnnnnnnnnnnnnnnnnnnnnnnnnnnnnnnnnnnnnnnnnnnnnnnnnnnnnnnnnnnnnnnnnnnnnnnnnnnnnnnnnnnnnnnnnnnnnnnnnnnnnnnnnnnnnnnnnnnnnnnnnnnnnnnnnnnnnnnnnnnnnnnnnnnnnnnnnnnnnnnnnnnnnnnnnnnnnnnnnnnnnnnnnnnnnnnnnnnnnnnnnnnnnnnnnnnnnnnnnnnnnnnnnnnnnnnnnnnnnnnnnnnnnnnnnnnnnnnnnnnnnnnnnnnnnnnnnnnnnnnnnnnnnnnnnnnnnnnnnnnnnnnnnnnnnnnnnnnnnnnnnnnnnnnnnnnnnnnnnnnnnnnnnnnnnnnnnnnnnnnnnnnnnnnnnnnnnnnnnnnnnnnnnnnnnnnnnnnnnnnnnnnnnnnnnnnnnnnnnnnnnnnnnnnnnnnnnnnnnnnnnnnnnnnnnnnnnnnnnnnnnnnnnnnnnnnnnnnnnnnnnnnnnnnnnnnnnnnnnnnnnnnnnnnnnnnnnnnnnnnnnnnnnnnnnnnnnnnnnnnnnnnnnnnnnnnnnnnnnnnnnnnnnnnnnnnnnnnnnnnnnnnnnnnnnnnnnnnnnnnnnnnnnnnnnnnnnnnnnnnnnnnnnnnnnnnnnnnnnnnnnnnnnnnnnnnnnnnnnnnnnnnnnnnnnnnnnnnnnnnnnnnnnnnnnnnnnnnnnnnnnnnnnnnnnnnnnnnnnnnnnnnnnnnnnnnnnnnnnnnnnnnnnnnnnnnnnnnnnnnnnnnnnnnnnnnnnnnnnnnnnnnnnnnnnnnnnnnnnnnnnnnnnnnnnnnnnnnnnnnnnnnnnnnnnnnnnnnnnnnnnnnnnnnnnnnnnnnnnnnnnnnnnnnnnnnnnnnnnnnnnnnnnnnnnnnnnnnnnnnnnnnnnnnnnnnnnnnnnnnnnnnnnnnnnnnnnnnnnnnnnnnnnnnnnnnnnnnnnnnnnnnnnnnnnnnnnnnnnnnnnnnnnnnnnnnnnnnnnnnnnnnnnnnnnnnnnnnnnnnnnnnnnnnnnnnnnnnnnnnnnnnnnnnnnnnnnnnnnnnnnnnnnnnnnnnnnnnnnnnnnnnnnnnnnnnnnnnnnnnnnnnnnnnnnnnnnnnnnnnnnnnnnnnnnnnnnnnnnnnnnnnnnnnnnnnnnnnnnnnnnnnnnnnnnnnnnnnnnnnnnnnnnnnnnnnnnnnnnnnnnnnnnnnnnnnnnnnnnnnnnnnnnnnnnnnnnnnnnnnnnnnnnnnnnnnnnnnnnnnnnnnnnnnnnnnnnnnnnnnnnnnnnnnnnnnnnnnnnnnnnnnnnnnnnnnnnnnnnnnnnnnnnnnnnnnnnnnnnnnnnnnnnnnnnnnnnnnnnnnnnnnnnnnnnnnnnnnnnnnnnnnnnnnnnnnnnnnnnnnnnnnnnnnnnnnnnnnnnnnnnnnnnnnnnnnnnnnnnnnnnnnnnnnnnnnnnnnnnnnnnnnnnnnnnnnnnnnnnnnnnnnnnnnnnnnnnnnnnnnnnnnnnnnnnnnnnnnnnnnnnnnnnnnnnnnnnnnnnnnnnnnnnnnnnnnnnnnnnnnnnnnnnnnnnnnnnnnnnnnnnnnnnnnnnnnnnnnnnnnnnnnnnnnnnnnnnnnnnnnnnnnnnnnnnnnnnnnnnnnnnnnnnnnnnnnnnnnnnnnnnnnnnnnnnnnnnnnnnnnnnnnnnnnnnnnnnnnnnnnnnnnnnnnnnnnnnnnnnnnnnnnnnnnnnnnnnnnnnnnnnnnnnnnnnnnnnnnnnnnnnnnnnnnnnnnnnnnnnnnnnnnnnnnnnnnnnnnnnnnnnnnnnnnnnnnnnnnnnnnnnnnnnnnnnnnnnnnnnnnnnnnnnnnnnnnnnnnnnnnnnnnnnnnnnnnnnnnnnnnnnnnnnnnnnnnnnnnnnnnnnnnnnnnnnnnnnnnnnnnnnnnnnnnnnnnnnnnnnnnnnnnnnnnnnnnnnnnnnnnnnnnnnnnnnnnnnnnnnnnnnnnnnnnnnnnnnnnnnnnnnnnnnnnnnnnnnnnnnnnnnnnnnnnnnnnnnnnnnnnnnnnnnnnnnnnnnnnnnnnnnnnnnnnnnnnnnnnnnnnnnnnnnnnnnnnnnnnnnnnnnnnnnnnnnnnnnnnnnnnnnnnnnnnnnnnnnnnnnnnnnnnnnnnnnnnnnnnnnnnnnnnnnnnnnnnnnnnnnnnnnnnnnnnnnnnnnnnnnnnnnnnnnnnnnnnnnnnnnnnnnnnnnnnnnnnnnnnnnnnnnnnnnnnnnnnnnnnnnnnnnttctgacccttgtgcaattggatatattccaattctaaattaactaatagttccaacaattaactcttagctaagggagacataaccatcacaataaccataggaataggtggaataacgcaaatcgttgtgttatgagcaacctaaaggtttcataaaaccaaaccaagaacaccttgtgtgctccttgaagaaaagtcttaatagtctctgcaccaagctctaatacaatagtataacaagttcaatctcatagcaaccaagcataatttcaaaagaatgttagcagcccattatgtttttcgtgaataactatgagaatgataaattcatcatacttttgtcatatgttgattgttggaaaagatacgactaagataggtgctctcaagaaggattaaagaaaatcttttgctaggaaagatatgggtgtagtaaagaagattcttgaatgaagatcctcaaagatcactctagaaaaatgtaatggatgtacaagaagactatatcgaaaagttctaaaaaggtttgacatgcataatgtcaaacttgtcaatgttccatacttggtcatttcaaactcaacaggacataatgtccaaagaataaagaagaaaaagaagaaatgattagtgttttattcttatacaatgggaagccatacgtatgcaatggtttgtacaaagtcagacatttcttatgctataaaagctataagcatattcctatcaaacccaagaaagaagcattaaaatgttttgaaatggatactaaaatattgaaggggaattgccacttgacaatggaaatttaatgtttcttagttattcaaatacatttatggtaggagatgtcgatttaagaaatttatataaggatatttgattacttttgcaaggggacctatctcatggcaatgatgactacaaaagtgtattgctttaaacaccacaaaaacaaatacatcctaatcattcaaggttgtgatgagatcatgtagataaagaagtccctacaagaattcataatcaagaagctttagtctccactgcaatagtcaaaacaaatcatctcaacaaaaacttgacattaatttcattcatggtcaaaacacattgatgtgaagtatcactaaatctgggatgtgttgaaaagtaaactacaagttaataaaattcactccaaaacaacatggcaatatgatgacaaaagccctaactaaagaaaagttagaatcttgtaaggaagttgcaggtctaacaacaatccccaactaatataaggatattttccttttggctagagggggagaattgttggttgtcttgtttttttttaaatttgtacggagtatccattggttttgtcaatgactaattgctattggaaaatcttattggtcatatttggtgagattctctcctctcaattacgtcttttccatctacaaggctcaaacctgaaaccttgcttaaaagggccaaatacagtttctctcatactaacaacaacttgtttgatagaattgttggttgtctagccaaagcattaaatgaaggttgaaattttcttcgacctttgcaccttttggtgcttttaaaattagtaggtagataattgcacttgatgcaatccttctataaatagagaccttcttcaataatagtaaaaccacctgaagaattgagattctcataattatattgaaagagagtgaaataaaataaaatagagaaaacctcaacaaaagttgtttgagagaaaaataatgagtcaatttgtgagattttaatttacaaattaaagatgcatcgttattgtaattgttcaaagacacatctaaggatggagtttgtaatttcattattgttacaatgaaagttaagtgacttacgggtcccttgacatgttctacttgcctagttctctttattttcttataagctatcttaattacattgagaggaaaacttcggttggtatttcccaatagttatcaaatgcattcttgattgtattttcttaacaattagtgtaagagtacagatctcacagtaatttgctttaataaacttgaataaggatttcttttggcagtagatgctaatacttgacctcatggcctttacagtttggaaactttttagctaaatattttgcaacgttgttgtttgctttagcttttacgtgaggcaacgacgaaaagtgctttgattctggtttgcatgaagaccaagatgattaacttggccatttttggagcttgatgatgttttttctccctaactttctttccctttttgggttgtatgcaaagtacgatggaggagactagaggtggaaatgggccaggctgcctatcagggacctttggcctggtctgtttaaggcctgacttggtctaacttgtttattataaaggtcagactaaggctttttgaaaagcctgtttaaataaaaaggccaggcttaagctttaaaaaaagcttgttaggcctatcaggctagcctatttaatatatatatatatatatattaaaacttaaaaataatatatttatttttctaaaaatattttttcttattaacaatcatatagtgtatgatgaatggcataaaatctatataatatatataccgatgaagatgaatggcgagtgtgggaatgcataaaataggtctattgattttaacaagtttatgcacataagaattatggctacttcatagaatgactctgccagcaacactctaactcctatcaaaccaagtgtaccacaagccagctccattagtctggacatttaccatggagtagttaaacttgtaggactgtgttttgggcttcagtttgaggcaggggctgtcggtgtgcaccggtattacgttaattttttatttttaattatttttttatttaatcaaactttgtatacaggctttcaggtcaggccagacttttatgcgggtcaggctcaggcctgtcaaagcctggcctggcctggcctatttccacccctagaggagaccaaaatctgactagaagaatagtgctttcctacaaagaactttaggaagccaaaaatagatacaacataactagcacaagagtcagagagatcagattatgaattttcactctttccagtagtaatagttctctttggtcagtgagaggaaacattttcttcttgatatatacacaaaagcaactataggacactacgcccatgatacatcatacactatgtccattggaatcacaatgccttgggaagaaggacacccctctgtcctgtcattactaattgccatgtaccaactttgaatgataaaatgatgacatgtttagcgcagatgatgcctgcaaaatgtgaaacgaaaatcaattggctgagaatatgaatctgagtaacctatactttacaaaagagttaacagaacatcttaactaaccttagagtctcttttgtaccgcggcgtattttgcaacggatggtggggagttcaaggcgctgatgagcctcataacggtgacagccagagaaacctacaaaccaaagataaaggacatattgattttccagtgagaaggcatggatggatcttgaaaacaagttagtccatcatggtagatctttcaagtccttcaagtttctgattttactgttttttagctatgagcatgaccaagttatgtaataataattataagattccatacacaatccaaaaaaaacacataccataatagactccatcaacctcgaggacatcaatctgtatcacttaaaaggaacttgaattagccgcagaggaatatatcttgatgaatcagatatttgtttaataagaaaaaaggaggaattgtaacttttaaaacataaaatgcaagaaaatcataacatactaatatttcaaaagatgttcttataccatcaattatggacattaaaacaacaacaaaaatatattgattatatcagcaaaaagaaatatattcaataggcacaaggggtacctaaaacccatatacaaaaatgatttacaacaatctataatacataggttatctactattttccattctcgtaccaaaatggataatagataataacccatgctatattgatttccatcatataaaaaatgcgtctatcctcaatatcaatatagaagtgctgtaagccaataaattgaatcggtgcttaatatggtagtgtgaagccaaacaagattaatcacaaatcattgaagtgatattttattttcttggtcttaatctggtgaaagtagtctcatacagagtagatgccttataatacagtatccactgtatcaacttatcatcatcaaggaccaattaatcaaaagtaataagaattggaatctaaatgtttcagtcttggttgttcaatgaaccatcagtgacaaatatatggtataaaaggaatggctgtaacaatgaatttatgcatctatggctccactcctaaaaaaattcttaagagtttccttgaagaagagaggtaccttggaaacacgtaaagactctacgactcaactcctaatggatgttcttttaatcatgggcatactacagagagagacaccttgaaaactttttcaacgaaacatgaaactcttatctcttataggaattttcatatccaataatgactcgaatatgattacattttcccctttcttttgcattatatcaatgcaaatgattgaccctgagaatgctcaggatgaggaaatgaagctctaccacccacttgcatagttataacatgcaaatatctacctaccagccactttcgccgttctttttatttagaaagcactcatgttagagacaacataatttttctcttgacatttccaaaagtggcttcactatcctgattggcacagataatagccaattaacagtgtggaatacagcgcagatattgtcgttccaacttccactgaaaaatcgttccaacaaatccataaaaatcattttaggttgtgtgttttcatattttttttttgtactctcagaccatatcttttcaacagacaaagcttgaagaccaaagaaagcaacaatttcagctcatactccaattcaaactacatccaatgggatcttcataatacataaaagcctatacctactttcattttctcataaacccaacatagcagaaacagcacataaactccaaaagcaatgcagagattttaaaaataaatcagcaaaagggagcaagtggttacaggcacttgtagaccaatttccttgatactatccattaattcctgaactttgttttgatcatttgctctggtcctcatcaaaggccttctgatcttatcaagaggaagttccaatatcacagggcccccacccccaccactactgcttccagaaccaccaggaggagctcctaaatattaaaaacaaatcatttttttatatgctattaagataaataatttgaaattgaaagagagagagagagagagagagaaatatatatacaatttttaattgacaaaaagaaatagggggagtagtgcaccgttggagttggaggaagcagacacagtgaaactcctcaaagtatttggaacctgtagaacaaaatttgccatttttcttcttcttctctacacaatttttttgtcttgtggttctaaatatatagtcaaaacattgagaaccggataatatgataggcaatcacaagcatggcccaccaatttcaatggccaagattgttcttttacaatcaataaggaaggcccttctacacagaattcgctccacaaaatggtgaaagataaaaaaagaaaattaaaaaaaattgattgatctcaattttcaacttcactgggaaaggaaccatagcagcgattgcttctttctatcttgttaggtacacactacactacatagttttaaaatcggtaccgacaggtcaaaccgcgagtcggatccaatcataagtttgaccggttacatttttgatccaaagcgatctaaattgatcccgtcggatttgcgattgaatcggtgacctgttgacctggaccatatcactttgtttttcattttttttttgtgattttgagttaaattgatatttcattcattcttgaatattttttgtggtcggaaatgtgattgaattgcaggtgaaattgtgatcccgaatcattttttaaatgttagagatattgatatatactgtcattgatgtttttgatgttaaatgttaaagataataatcattttttaacttgtgttctttatattttatttgtgtttttaagacttttaaatttcaatgcatcaaggagaaaaattttaagataaatataaaatttttatatttttttattatagaccttcatacatgtcaattagtaatctagtgataatctatcaattcgaccactcaaaaaaaaaatccaacgacataaccgaatgaatcatctaacccatttttaaaactatgcactacactactcactcttcattcatgtgtttatgaatattgagttgggttttgaatggttggcaggaactactcgccattggtgtcagtaagaactttcgttgcgaaatcggacaacctcaatttctcaaactttgttcttccccctcaatgtcataggtggagtattttttttttttctgcctttattactattcggggatattttttttaaaaaaaaacttaaatatttttttcatatctaaaaacactcattttttttaccacctaaaatttacttttgttcatttacttatccaccaacatttttttatgtttcattgatgatatgaaaaatttaaatttaagtatgtgtcaatgattaggtattgatgacgaaataaaaaatttcatataatttgtttggacaatagcgagatcatctcatctgcctcatcataagcaccacaaataggagaagtccacaaagctgattatctatctcatcaaattgtagcagcggtagcgcaccattcgggctattgcttcctgcactcccttttgccttccggaatagtcaacccagaatgtaaaatcacatacattccggaatgtactccttttttgagtaattttacattccggaaggtaaaaaaacactccagaaagagtgaagaaaacaacttgggaagtgcggaagcaacaacctaccattaaccattgttttgaattgccctatcaatgataagaagaaagaaagaaagagactatattatgatctaaaagaataacaataataactttattctcaccctgtacaattcaatcacggtataatgtaatttttccctcctagtctaggtctcaatgcgtaaaaacttatatggggcatattggaatgtacaacagaacgtgttgggtattatactcgttgcgcatggcaggtgacaagctatgcattgcacagcctcgagataaacctgatttgagtcaagccccgcagaacatggaaagatgtctaatgtaataacttctcttgcatatctcaatacgaattttgttggggaatgagttgtttatcgtcaagtcacccatatgtgaaatatgagagaaaccatattcacaaactaccattatccctgatttaatgtactcatcaccttgaaatgtgtcctgacaaaactgagtgagccaccgatttcatggaatgccaaacttgatagagggataagtgctatagggttctaacaactgcagtctggtttgtacatacgcaagagcactccacttcctttccaaacagccttttctcacggttaatcatcaatttaatcagggggagttttttcgaaacttggcgccaaatctcatttaccgttccatcgggttcttcgtattcaaaatatcgcttaacctgaaaccagataaactaaattaattccaggaaaaaacaaatacggaaaaaaaaaaatatatatatatatatatatatatataaatgctctttaccactatatttttcaaatagaaaccagacatagtaaaatataaactggagctaatttctagtaccttctatagtttctacttgagcaactgggagaaagcaccaatgtatgcaacgcaaatacatcagaataaaaggattcaagggtggcattaataatatacaggagagaagcaatgagaatctactgcactaattgcctaattcaaattaactattgaagatctagtttaataaatcatgaaaatgccaatcaccatggatctcacttagcataaacaataagaaattagcacactcttactaatgaaaattaaccattaattacttcagttaaaagaccatgaagggactgttactattgggctactgataagtagcaatgtcaatcaaagtccaccaaatatcattctatatagtgattctatcatactttccaaaagattaaaaaatgcaacaggtggagtgaaagacaaaagtagtaatagcaccctaagaatttattgcaaaaatacattatgccagcactactaacctcctttagttttttctgatattccaagactctatctggggtcactgctctcaattttgagagcaaatgtcctggctttatagcagaagaagtttctacaaatacagcaagctttctgtagtctatagtgtcttcaaaaggcaactcgatattatcactgacaatcactggaatgcacaagctaactatagcatcaaacagtcggcaggctgatggagtatctcctgccggatgtaaacagaactttgatgtatgcattccctgtgaagctgcccgccgactctctctggattgtgctccatgctttattatgacatccttttcattttctagaatttgaaagagtaaatcacgaattttccctccctataaaacagataaggacaaaaaggaatcaatacaagaagaagaataactcgtccaaatcaaaggccaatattctggctatttaagcacatgcaaggaaaaaaacactcacaacatgatgctcaaatgttttaataaaaatacaaagggaaaacttattaatgatatagagtgctagaggtactacactgtatacaagactgaccaccagaaagagcaacattacccaagcaaagaatacgtatcaattcaaatttttacggttatccacgtaaatcctcttatagagacaatgctatctgaggcactgtttgagacatatcggacactaatgtggacactttctcctatagggattcgaaccttggtttgccttattgtaaacacacaagcaaaaatattattttgtccatagtagaaccaaaattttaaaacaattcacggcgcaattctggcagcaatgtcgagatttttaggctctctgccacagcaattgcggcggcacaagccgcattcgttcacaattttccacaatgttaaggatcacaacacaacaaaaccacgaccatgaccgcaatcatggtttaaaattgcggtccgtaacgtcaagatatattgacactccgcaattgcggcctcatcagccacattttcccacaatcgccctcaatcgaaaggttttctggctcactgcaacgcggccgcatcagccacaatttctggttcactgagtgagcaacagaatatcaaacaacttcacattaacaattcaattatcaaaggtctcaattgaatccatgttcatcacaaacagaatacaatacaatacctctttccggtaccgattccccatgaaaaacaacaaggtcttacgatcttcaacaccgacatcacccgggtacgttctgatccggtgcgagtagggcacaaccacatccttcaccagcgatccctggtcgggtctcaacctcccgaaatcagaaacaagcaatacagcgtttctgacccgatcgatgacccggtacatcgcattcggatccgaagccacaatcacgtgatccctcccattgttcctcttccaatactcctgcttctccagccactccaccagcgcctcctgattctcctcgtcgctgtaaaccggtttctccaaaccggaattcgaccccggcggtcgaaccgggttcacgatgagactcagcgatgagaagaacggaacgaagaacaaatctgcttcttcgggatccgcgacccgaaccactggcgagcccgagcctgcacgttcagactcggctcgggagagatccgcgaagaggtaccactccgccatgtgctggtgcccggggtacttgggcgccgccgccacatcatcgggggaggcgcgtgaggcgccaccaccaacaccacgaccacgcgcaagcgcgtggtggtggatgacgccggtggtgaaccttggcgggagatcgtagagaaaaaccttgacggataaggatttggtggttccggcggagaggagggcggaggaggcggaggagaaggtggcggcggggtcgaaggcggaggaatcggtagggtggaagaaggcgttgaagattgcataaagcacgaacaagagaaagagcgtggctagggtttgcttcagaaggggttttcgcgccatcgaggagaaagtggtggtgaaacgagaaaccaaactcggtggtggtttgggttttctggctttgttggctttggcggctttggcttcctcgttcgtgtttttggggtacggcatcatcgccactttcttcaacttactaaatgtacgcattcataataataattaaccatatatataccactataagcctctacgaagatgatccaattataccattggatctctaccttgcattaatttgattaaattggcccttcttagatatttgatcaaatgaaatgtggatgcaaagatgggggaaaatgcaatgggaagggaggagggtgcaatcatagggatatggtttattgtactattggggaagtagttgttatcatgagtaaataaatgttaaatgccagctaacttggttcgaatgtcctctgttatcactgattattttctatttttaattaagttaattatgatttgtggaagaatttatttagaacttttgtatgttgcttaatgagttgtttatatgtagacattgttgtttaattttttttatcattagatattatttatgtgtcatgttggattatttaaaattaagcaataattacttatgagtaaaaaacatttttttattatttaaggatcatttaacgaaattattcaatagcttcttattggagtaaaatatatataatttatttaattataatgtaacattctaaagatcaattaacataagataaaagaaatcaaaatgaattatttaaatttcacccattaaaaatgttgttagagaaaaattattctcataagtaaataaatgttaaatactagctaacttaattcgaaggttgtgtacatgtactatgattggagagaaaccaagatgagataatttatttttgaaggagatattcttatgtaggtacttaacactttttttttatatataactaatagaaaaatgacaagtgatgaaatataaagaaagtgtacttcatttattatctttaatttgctttctccgaataaagaaatgatatcattaactttttttaatgaatgtttgaatcttatgaatacattttaaacaattaaaaaattcaatnnnnnnnnnnttctgacccttgtgcaattggatatattccaattctaaattaactaatagttccaacaattaactcttagctaagggagacataaccatcacaataaccataggaataggtggaataacgcaaatcgttgtgttatgagcaacctaaaggtttcataaaaccaaaccaagaacaccttgtgtgctccttgaagaaaagtcttaatagtctctgcaccaagctctaatacaatagtataacaagttcaatctcatagcaaccaagcataatttcaaaagaatgttagcagcccattatgtttttcgtgaataactatgagaatgataaattcatcatacttttnnnnnnnnnnnnnnnnnnnnnnnnnnnnnnnnnnnnnnnnnnnnnnnnnnnnnnnnnnnnnnnnnnnnnnnnnnnnnnnnnnnnnnnnnnnnnnnnnnnnnnnnnnnnnnnnnnnnnnnnnnnnnnnnnnnnnnnnnnnnnnnnnnnnnnnnaaaagagcatcaatgtagtcatttttttctagcgacgattacaaaccatcactaattgcactgtaaaaaaatattatttaaagcactggaaaaacgaaaatagaataaatataatttctaaagactaaaaataaaaaagtaattttacaaaagtaaaatataaaaaaataaatcgtaagaaataaaaatgtatctaatcgaaacattgttattgttataaactaatgtatttttagagttgcaggtttgctttcttcatgtaccttgattcccggctcaaatctccacaatcatgaaatttccagtattacattaaaatttatttgccatattttaagaccatccatatttacatatctttaataaataatgtgttcaagaaagcatgtaatcattccttatcagttattgtgttgactggtaccgaaggtgatctcattgatatgtcatatctataattcttagacagcaatagcttccagaaagcatgtaaagtgtcggaggcagaattttattaagagagaacgaagataaaaaaaaattatattataaataaaaatatttcaaagataatataaatttgatataaaaaaattattataaaaattaaaattctgagaagtaagtttttcaatcagtatctcaatatgttgaaattggttcataaaatcactacatgaattcacagcattcttatgtattgagataacattttttctaatatgacgtagaaaagcacaattttcttttcattaacttttttccaatttttaaatccttcaataacaaatatattaaatccaaaacgatcactgtcacatgatttactaaataaataacaaggcaaacaaaatgcagcatctttgcttggagactactctaaccaagatggaaacaaatcaagccaagaagaccaaaaatgacgttgattcttatctgacccaaaaaaatgataattttgaaacttgcactgtaatagaccaaatttaagataagtacgacgaatttcatcttgttgattataggatattttcatattggagggcatagtacaggatctctttctaataaagcaagatcaacttctttaactacctatttattttcaattctatgagactttgaagaaggagtctcagtattcaacaattcaacgatctcataatttttctgcgcgtcaatcacaaacaatattaagtatcaatggcaaccgcgtaaagtaaatcattgttatattttgaatgagatgcacacaacacattgcacaacattaacaatcaaaacagtagtttattttttttatttcgtttcagatttaacaaaaatgggttcagtccaacatggtaaggggtgtatgcgtaaaaacaaggggcataaattgcagtttattttattttagaagaataacaacatgaagaagaaagagaaaaagagggaaaaagaaacgaacgagggatatctgaaattcttctctttcactagtttatcaaatgaaataacttttttgactccttctgttctcttggaatttgtgtttcttttttctcctttgtgttcagacttctttcttttataacgttctttctccctcttcctctttattcttttcctttttattattatttttttctgttttatcatcttcttttcctttttttctttttgtattatctctctttcccattttatttttattacattttctttccttttttatatattttttcctcttttatgttttctttcatttttattgttttaatatttttctttttctttttttattacatttttttatattttttttctttcccattttacctttttttaatatttttttttcatttttatttttattaatttttttggggggcggtggcccaccctaatccctaattccgcctctgagcatgtacttagagataatttctctccattaatttctgccatagggaatgattatatgtaatatctccaagacctaagtattcataaatgttcatgattgttaagcttagttgtaagttgctactccagttgatttcagaatatttgttcatggactttgatatggtggtgaggtagcatgatatggagtatgatatagtacaccatgatttggctattgtagtgaagtgatgttatgatacaaccgtgtcatgcaaatttcagttgaacccagataacgccacacttaaaatactcaatagcaaatggtataggactatagtatatcctaattatatattagtcaaataacaacatagctgaataatacctgccaattcaaggcaaacctgaatattaatatgataaattacactatcagcgtagactcggtatctatattaacaatttattttttattacataaaattaatcaagttaactttatattttaaaagtaaattattttcaaaacttataactgtttgcccgctttgtataaagtttggattgttcgatttcaaatatacaaggtaatatttggtaaagggttcttttgtttgaatcaaaaatgaattaaacaagattttatcctttttaaaaatcattattagttattattattacattaattctacgctatgaccttagattgtgaaatatgaaaactaatttaactttaatataatatcataaatttttgttctaaaaaatgttatgatttactaacatcgtatatttattattaaaataataaaattatttaaattaaaattgttttataaattaaaaaaaatattttgttgtgatgggataactacaaaattttatcatagtcgagaattggagacgaagatgaggacgttgttggggcaaggatggagacgatgttggtgagcaaggatggcaggaacaagaaaaacatatacatcctcgatctgctgtcatatatattcaaaatcatcttttatacattttttcgttttaaataattatatattataatcaaattaaaatatacttttaagtcttttattttattttttagttttaattttgttttaaaaaatcacattaataaatctatgtgtttttattagatcaatttatcatataacataatattaaaatatacaaaataatttaaaagaaaatataaaaacaaacgctacccatgcgaagatactagtattgtactagtaatttaatatactaaaacccttcaatcttttacaaatttttactatgaaaaattacatattattatcgttactgtcaccatcacatcattattgtgctatcattgccaccaccaccatggttacattgttgcggccaccaccatcgcttttattattgttgccaccaccatagtcccatcaatatcactactaatgtccttttgccacaaccactattgtgcactgtcaccattagtaagaccattgttttgactattgttgtcactagtccactactactattgtcaatatcgttggcttcactaccactaccgtcgttaccacaattgcttgaaggatgtaagaaacacaataatgagttgttttattttaatgtgtaattattaggggtatctatatggacctagatccatggactagtctgttaagcccacggactgtgcggataacagacctaatttttttgaatccacaccgtaatcttagattttaggcccaacccgtttagtccacggacttaatctacaaagtctgcagacttatccgtattcgcttcagttgaaggtgacgtaagtgcagctgtgcattttgctttgccaacaggccatcactcacattcacatacacaaaaaacctaatttagagtttcgttttcttctcctttgagaacacacagtcgccatccctccttctcctcccttgtgagtcgtgattgcaagtttgatgaccttgtacaacagccttactcccccgcgagtcgcgcctccctatgccgcacctcctcccccgcggtcgtgcctctctacactgtgcctcctcccccacgagtcgtgcctccctgcatcgcgcctcctcccctgtgagccacgcctccttgcgtcgcacctccacaaccacattggcgccacctcgagttgacctcgagtcctcgacctcacaggcttgcataactgcaccatcctgcatctttttctctcttcattcattgtgcagtcactcactcttttcaccaccctttgtctctattttaaattaaaaaatgaattctaaatgtaggacactaaattactaattattagaacttgtgcttcatgaataaggaagaaccttgctagtagcaatgcttctaagccacctcttatcaattttttttcgtgtgttcacaatatttgtaagcctaatcttgcaagtttttctctctacttatgtgtcttttatttgttgaatttagacttgacaaatagggacctaatgtgcttgatacaaatatagctaatccctttacttgacattgcactagtcatgggcatatgtgttctatttgtaaattcttaattaattgtacttgacattgaactaatcattgcagcaaatgtgttctgtaatgtttgtgggtgttctatttgtaaattcttaattaatttgtaatagcctagtaggaaattttttatttaattattttagctttaattattcaactatggattcttttgaggctttgttggatgaaaatgttgaagatgatgttgaactagatgaaaataatattccacctaatgaaattgaagaagatgaacctaattagtgtgaaaggccaaataaaagggctaggaatctttcatttggtgtgtggattttttttgacaaacttgttaaatatcctgatggaaaattgggggccaagtgtaagtattgtaagagagaccttgtgggcggtgggagtttgagtggaacttcaactttaattcgtcatatgaaaatatgtgagaagaaaccacattcaattacagagtccgatgtcgggaaacttgtgcttgatcatactcgaaaattaagaagtagaataattgactaagaggtgttagatgagagatttatatgatgataattggacatgatcttccatactattttgttgaatataagaggtttaaggagttgatattgtatttgtttcatgaagctaagataccctttaggcgtgtttccactttgtatgtgaaaaaattgtcggacaatgataagctaaagttgaaacatgtgttgtctaaaccgcctggtagaataaacttgactacaaatgtgtggacttcttgtactttagaggattatattacattgactgcatattatgttaatcaaaattggaagttgcagaacaaaataatgaattttttccattttcctcctctacattctaggcgtgaaatgaccataataatttatagtttttaggaagattgggggttgaatagaaaatattttcattgactttagataatgcatcttctaataataaagtgcaagactatttgaaggataaacttcttttgcattctgatggtttattgtgtggtggtgattattttcatatttgatgtgttgctcacattttaaatcttattgtttaagaggggttgaaagttgttggtattagtattcataaaattagaaaaagcatcaagtatgttaaggggttggagggaagaatgaaggctttcaaatattgtgttgctaaaatgagtggtattaataccaagatgggtttgtgtttagatgttgttactaggtggaattctaatttgatgcttgagagtgcacttttgtaccaatgtgatttgatatctggttcttcttatcctacatccaatttgtattacaaacaagtgtgggaaattgaatgcttgttgattaaaaatgtgattaatgaagatgagacaataagagccatggcaactaaaatgaaaaaaaattgataaatattggagtgattatagcatgattctatcctttatgtgcattctagatcctcgtatcaagttttggatttttgagattatgttattcaaagtttggtcttgattcaatgtctatcgaaacaaatttgaaaattgtgaaacacaagttgtatactttatatattgagtatattaaattgaattcgaaaaaagcaacaacttacaatgttgcttcaagtcaaagttcatcacaagggatttcatctgttagtacttttgctagtggaaagtcatcaacatcacaatggcttattgtgaatgtaattaagttcatgtttttctttactcttttagtctttttattttgtttactttactctcttttttacctttacttactttttttaaaataacataggagtttatacaatatgagaatgaaacattgtcaattgtgaataaatctcatttcgacacatatttggaagagcaaaaactttcttttcaatatcatccaaatttggatcttttgcaatattggaaggagaatacaactaggtatctagaacttgctttgatgacttgtgacattttaagcatttaaattacaactgtggctttcgaattagcatttagtattggtactagggtgcttaataaataccgaaatgcacttcttcttgaaaatgtgcaagccttgatatgtactagaacttggagattaggatttgatggtaaatgctatattaatttcttagatgttacattaaattatttattaattatctttttaactaacatacttactttatacttatgatgttgtgataagttgtaggaaaaaaagatgaaagtgtggagattgagaaggatagtgaagttatatcaaacatggagtcaaatgttgtgattggaaatgcttgaatcttgattatgtttgttcggtgtatttgatttacgaatgttttatgtttgatttgttgtgtgtatttgaatgttttaatggttaagactctaaggatttttagttggtttgtattttaactattgttaagactttaagaatagttagtttttgtatttatgtgatgcttggactttggcatttattggataagttgtaaccttcatgatattttatattatatttaagactatttgtttgaactttatgttaagattacttgtattctcatttttaatttattcttttagctaataaaaaaaatcttatattttagccttaaaaataaaagaaaaaaattgctttgattttatattcttaagaaaataattaaaaaataataatttaggctcatggaccaggacaaatggaatccatttatctgtaattcgatgaaatatttgaattgatgagtacatttatgtatcaatgaaatgaatttgatgttatgattagaatgacttcgagactcaattttgaaataatgtattccattaatattggtcaatttcaatattaaaaattattattattttactatattctattcactaggtaaatataattttttttctttgataagtcattatgcaaattatatatatataaattaatattgatatacatatattataatcccatttatataatttatataataagtatatgcggtaacaaatagatgtattagtcatattgactaattccttatttaggaattggctcaaatagggcccctttaactcaatggtagagtaacgccatggtaaggtgtaagtcatcgattcaaatccgataaattattcacaggctttgtgggttagatatggacttaaaaaatacatttattttgagtatttatctggcccatataaaatgtgggtttcacgagctgaaccttaaatggactagaccgatccgtatatccactcctagtaattataaacttaaatattttttttgtccttgtaaatatatcattttttttgtccttataaatgatagtatttattttgatttttgtccttataaaaaaatctacaaaaatgaaaaattaaaaacaactttaattacgtaaacaaaaaatatatttaaacctaaaccaaaatcaaatccaaattaacaagagttaaaagtgcatgtcaggtccaatatatgctaatattccatagaaagaactaataaaagaaaatcataatgtaattagctcaatttcaagtgataactccgtacatactgaaacctagctaatctaaattgatcagatgaactaaatcaccagaattcaaattaatgccctcaaatacacatggcctaacccaagcattcaaatcccatggtctgccattaaattattattttttagacacttgccattaaattaatttgcaactcagcaaaaatggtacgataataatgagaaagataggatgatgaatcgtcgaataaattccaattagtattctgcaccaattaatctcaccccaagacacaccagtatccaaagaatatatagcatcccaaagtataattggcccatcattcaacattaaacaacgatccaaacaaacgaactcagaagcaaaaacaaaacattaagccgaccgccaaagcacacgaaataagagacatagagctattagatcaaccacgatctgccataggatcaaactcaagcatagcaggaaatagaacaaaaaaaggaaactgttaacagttcccaattatacatcatgaaattattttccaacctattattgaatattgatagacattttccttattagataataagatgtgtaccatcagttcagatcagtctagaccctaggagaaagatgaacctgcaatgcatttttcatcacaacagtgaattcttgtttctccgacaaatccacattccctccctcaggaaccttccactcaaaattccaaaccaaattagccacaaagtactccaaatgaagcaaagccaagttatatccagggcagatccttctcccagcaccaaacggcatcatcttaatctctttactcccagttatatcaaacccttcatcattcataaacctctctggcttaaacgccattggatcctcccacaccttcgggtcccaccccatctccgccaccatgaaattcaccgtcccattcttaggcaccaaataatccttcaaaatcacgtcttcagtcacggcatgaggcaaaacaaagtgccctggtgggtgtcgccttaacccttccaaaatcacagctttcagataaggtagtttctgcaagtcgtcttctgtcacttccctctcttctctctcaccaactgcttctctaatctcatccaccaccttttcttgcacgtgagggtacttcaccaaattcgccattatccactgcaacgctgtggaagttgtatccgtacccgcattcagaaactcgttacagagcgtaacaagttctccttcattcagcttgcgtttctcttcaggtaattgcaaatccaacaacgtgtcaacataggaaacaacttcatcgtcgtttaatgaacctttattgtctttgtctcgcttttccttcttggctcttattagtggaaccaacacgtcctcttgctccttgcgaaacctcagcaactcctcccaacgtttgctgtacaaaacgcgcgtgacacttggccagaaattcagcacgttgaacctgttgacccgcagaagcatttgtcgctccacgcgctcgatgtctctgactatcccatcgtcgagcctttcaccgaagcacatgaacacgagcaagcagaacatggggtattgaaaatggttaacgacttttattgaatcgttggattgtgaatctgatttgaggcgtgtgaggagggtgtgtaggacccacttgcggattccggagaaggacctggcgcgtgacgggtggagcatctcggaggcgaggttgcggcggagggcgcgccacgtggcgccataggaggcggagctgatgttgtgctggttgctgttgaggattttaccggtggcgaggcctttggggcggtcggagaaaatggaaccgttttggattagggcttggtgggccagggttctgtcggcgataaatatggcggggcgtgatccaatgcggagagttacgatgggaccgtatttggcgtggagggttcggaggatcggttcgagttttaagatttttcgaagccataggatgtttgagatgattgggatgtgggtcgggccaggaggggtggtaatggttttgttgaaaagagagaaaaatatggttcttatgaacacgcagacacacagagagacgaggatgatgaaccaggattccatgagtgaggttcagtacgtgtttgttgataatccgaaagtcaaacagatgaaactatatgagaccaagggggatggatcatggattgaaaatttgaaatatacaaggaacgaaaaataagagaaataaatgaatttgttttcttgtttaacaaggtatttctttctctgcaatacgaaaaggtgacggtttcgaggacacgtggcacactaggaaatcttgagcagttatatataaggtcctctcattcgtatgattattacccatataaacctaaattaaatgatagtagtatctataggaatgtttgattaggatgaaggaatgggttagttaattatgatttgccggcccgagttgaagtcatcataacatataaaattcgtgttctttcttttggttttaggcttaggtggtgatggtggtattgtggacagatctaccttcataaaatacatgcagtaacaaaaaataatataaattcaatattatatattattcctacagattcatatacgagactatgagagtattacaccaacaatttaaatttccattaacttgttgtggatttgagattaatatatgcgggagaaactcgactccaacaaaatatcatgattcattagtatgttaattaacaattggagcgggtcatccttcttgttacttggtcctcacgtaagtttgttttcgtcttatcttggttatttgccgttcactgcaagttattcagtttgatttcaatgcgctggagggaattacgtttctaacctccaagcaaatatacaaattgagtatatgccaaaattaatattaggcttcttaattttcgctgattctatagattgtacttgaaaaatacaagtaatcggattgcgccatctatgcattatatataaaccaagttttatatactaaagagaattaaccccgttggtgattgaacatgatatgtgtaagttattgtatttctatacatgtacctttttttttcctttcttacatatataagaaaaacctaagttttatctggtagttgattcataattttgtttacattcatacactttttttctcttcacttaataatatttattacaattattattatatataatatttaatcattataattttattatttaattataatattaaaatatttacttctaatataatgttatactttaaatagaattaattttagaacagtaacacactaatataaatttggagttaactagatttgttaaaacgcgtttaagactttcaagtgaaacaggacaatttaattgcgtaagtttaaaatgcaaaataaagaaattacaagagattaaagatttaccaagtcccaatttatggtttatttgtacttagagctacacatgatgtagcgacgatgttaagacccttattgaccaaattctagctgtagcttgatgtttcaagactcaagtgtattgttcatgtttgttctccatgtgaaggtctaagtgggatggtgatattgaagtgttatatatatataaagagggattaaattatactaatgtaactttcataattatctatttttataacttgatataaaatatgatttttgttaattcaactattaaattatatttacatattatgaggatagtatgtgtcaaattttgttaaaattgaataacaataagaaggtaattaaattatttatattttaatatattttgaaatatttatattatgtaatttaaatctatatgaacgagataacaaataattttatattaatatgaaattttacatatgtgaaatatataaaaaaaaaactttcaattcaacatcgagttttaaaaaaatattatcgaattaaaaattataaaattgtgtaataatttttaaagttatatgaaataatttgatacacacttgtgtgtgtaatttttgttttccgtgcattcttctgggcatgatgaatatgcattttgtaaatgagcaagtacttagtctcggacaagttcaaaaaggctaccggaggttacttagataggactttgatgatatacaaacatacaaatctgcgttcatgtcatggtggttgtctcaggaacgtttcttaacagaatgcgcaaaaggaataagataaagagagaataaagaaaaggagaatttagagagagaaggaattgattgaaatgattcttgtcctcttcctctgtgggtccatggactataagtagtacatattaaattggcaattacaaaaatagacactgggtaattaaaataaaagctgtaaatagactcggtccttctattggttccttagcgttcagtccatgcaatagtcattaaaatgtcctggcctcttagatactcttccgctgctgagcttcttggcatttgtggacttatcagccacttggtccattacattaccccgccctatcaaaagagacttgtcggcaagtcgatcattggtcatcagaggtgggaacattgttgtctccgttcccagtacttcctgtgtaatcttggtattgtccaacaccataggtggttcctcgcactccttgtcctgaaagatagcacctttagccgtgtatgctggtgtggctgctgtagtccctattcgagctgtaggagctgccgctggtagctggttggcgtcttgttcccctgatttggtcattgataaactattttcatcctcccaagtggagtcttcgggtggtagatctgaccactggaccaacacctggggtatgagtatgcccttcctccagatttggcgagaaccaacaatagccataggtgtatgttgtagaggatggtccgttttggaagtgggaaaagtgtggatcttgaaaggtagaccagaccgaaaaggatgcagcaaggagatgtgaaaaatggggtggatgcagcaaggagatgtgaaaaatggggtgaatccgtgcagtagaaggcagcttgagacgaaaagcaacgggaccaacatgatcttccacctcgaaggggtcgtaataccgtaaggcaagtttctgtgaagacctacgattcactgaaagttgatgatatggctgtaaacggacaagcaccatgtccgttgaggtaaagctccaatttttcctttttttatttgcctgtgttttcattacttgctgtgctctgaacaaattttccttcgacgtttgtaggagagacttaagctcagaaagtgtagcattcactacttcgttagctgaggaatcaaggcaatatgccaacaggttcggcggagccttgccaaacattacttggtaaggggtaacaccagtagaagagtggaatgaattgttgtaatgatactctgctaagctcaagtatttcgaccaggacgaaggatgtgcatgtgagaatgccctgaggaaattttctaaacatctgttaactcgttctgtctgaccatcagattgtgggtgataactggaactgaaatttaattttgtgccttgcagtttaaacaaggaacgccagaagtcactaagaaagatcggatcacgatcggaaacaatggattcctgaagaccatgaagttttccaacataatcccaaaaagattgggccactttggcggcagaatagtgagcaggcaagggaatgaagttagcagctttagaaaaacgatccaccacaacaaggatagctgcaaatccggcaaacagaggtaagtgcgtaatgaaatccatactaaggtgtgtccataatgattctggaatctgtaagggttgtaagaggcccaggggaggatgattggggaatttaagtttctggcaaagctcgcactgctgtatatactgtttgatgtctctcctaattcccttccaagtgaaattttgattaattttgtgcagagtagcttgaatacccgaatgcccaccctggatagaagaatgatactcatgcaaaatggtagcaatcaaggaagacccggctggaaggaaaatccgagaacggtgaaagagtaacccatcgcgaactcgccaatcagccatagcacttgggttgttttgtatttcctgcaaaaggtaaacagaataagggtcttgtgtatattcagactgtaaaacttatgtatgatgaagtactgggccagatatggccatgaattgggttggagaaccctcaaaactcccagttggcaggcgtgaaaggccgtcagccacagtgttggtcttgccagtcttgtaagcaattgtatagttgaaacccaacaatttggacaaaaattgttgttgctccggagtttggataacttggctcctcaaattacgcaaacttttgtggtcagtcctgattgtgaatggagacccaaggagatattgtcaccatttactgatggccgacgttatggcaaacatctctcgaacataaacagattgacgttgcatagctggagatagtttgcgactgtaaaaagccaaaggtttctcattttgtaataagactgcaccaatacccaatccagaagcatcagtctcaacaacaaacggctgagaaaaatcgggcaagactaagataggagcagtgacgaggcgatttttgagttcggtgaacgctatggcagctgcatcagtccacacaaattcgggcttggataagatattagtaagcggaccagcaatgaaagcatacttcttgatgaatttcctgtaataccccgaaattcccaaaaatgcgcgtacttgtgtgatattgcccggagtgggccaccccaaaatggcttttagtttgtttggatcaggagacacaccctctcctgtaataatttgtcccaaataaggaacctccaaacgagcaaagtaacacttctctttcttagcaaataaagaatgggctcgtaaagtgttgagaaccgccacaaggtgctccacatgttgggaaggggaagagctgtaaatcaaaatatcatcaaagaatatgacaacaaattttctaagatacgcagagaatatggtgttcatggtggcatgaaatgttgaaggggcattcaacagaccaaaaggcatcactatgaattcgtagtgtccatgatgagttcggaacgctgtcttgtgtatgtctgcggcctgcattttaatctgatgataaccagaacgcaagtccaatttggagaaaactgtggctccatgtaactcatccaacaattcatcaattgttggaataggaaatttgtcttgtattgtaatggcattgagggctctgtaatcaacacataaacgtcacgtgccatctttttttttaacaagtaaaaccggagaactgaaggcagaatgattgtgctgaatgaccccagtacgcaacatttcatgcacaagtcttttgatttcatttttttgataatgagggtagcgataaggccgcacttgcactggtttggagtcaggcagcagatgaatgtgatcgttataagctctgtcaggaggtaaagacgagggctcactgaacacatcagagaattcctgtaaaatggaacacaagccaggaatggaatctgtcgttgctggttcgggaacaacctcatccatttgagtggaaaaacacatcagacaggaagaaatagagtcatgtcgcattagtttgtgtaactgtgatgaactaatgtggctgggtgtgggactggtaccaccctgaagtaagacaggcgtatcattgtgaagaaaggacatggttaaagcaacatagtcaataacaattgggcccaacgttgataaccattgtacccccaatacaatatcagctcctttcagctcaattacgtatacatcaatgctgaacaaatgagattgaattgtaacattagtagatttacaagaagtagatttacatgaactttaaaaggtgtaatagcatgcaaggttaaatgcaaatagtcagccatccgagaagtgataaaattgtaagtactacctccgtccaccaggatttggactggttgaccagaaatagtaccttgcagccggaatgaattggaggaatggtgaccacataaagcattgaaattaatttcatgaaaaacctctggttgtggtgtctcaggttgtgccacgtcatgttcaggaagctgctctggttcaatatcaggagggtcatcatctgagccctccaaatacagcaatgtagcacgacccttacatttgtgaccacgcacaaaaatctcatcatagttataacacaaatttttgtcacgacgagcttgcatctcagcagctgtcaaacgtctaataggaattgaagtcatggttgatggtgatttaatggagtcggaaggagacactgtagtgatggatgttgcgataatgggttgtggcgttgtactggagcgtggtaaccatggtttagaggaacggatctcagccatttgatcctcataaatttttgcgaaagcaaaggcagaagtaacatcagtagggcgatgtaccaacacagcatgacgaatctgaggtttgagacccgcaataaacaagcttttacgcatgagaggggtcaattctggtactctgcgagctaccaattcaaaagcagtttgaaattccagaatagtgccagattgttgtaatttagcaagagatcccagtggatcatcaaattttgaagggccaaagcgttgattgacagctagcataaaagattgccaatctggaaaatgtccatgcgtataaagtgcctcaaaccagcaagaagcaggcatgtccaagttaaaagataccaaatcaagacggtcatggtcaggaacttgatagtatcgaaaatacctgtcaacagcaaatagccaaggtccaggatccccaaatccaaatctgggaaaatccattttcatggtgcgtataggtggtgagggacgtgtggggcctgtgcccagcactcctgattgggaatttgtagttaatgtagtcatttggagctgcatattttggagaagatcgaaaacctcttggatttgtcggttaaattcctctagtcgttgattctgcagcaattcaaatgtttcctgacgatgatctaaagtgcgctccagggtagaaaattgatgatcatgggcatggacctgattggtgaggtctctgagtccggtattttctgccataactaaatgaaaacaccaatgtagcaggaacgtttcttaacagaatgcacaaaagggataagataaagagagcataaagaaaaggagaatttagagagagaaggaattgattgaaatgatttttgtcctcttcctctgcgggtcccatggactataagtaatacatattaaattggcaattataaaaacagacattgggtaattaaaataaaagctgtaaatagactcagtccttctattggttccttagcgttcagttcatgcagtagtcattaaaatgtcctggcctcttagatactcttccgctgctgagcttcttggcatttgtggacttatcagccacttggtccattacagtggtaaccacactcgtacgaatatttagacaatgttgacagtcacttagtgataatatctagttattcaccaaatgattttcagcatgtgtgttttgacttaatgatcggtctttttactccatgttaagtgtaaaataaagtacctatgtttcttattcattttgttcctcaaatgacttgtttttatacaaaacaaactcaactatataataggtaatagaaacaaactaatttaactatatagtaagtaacaaatttcctatatattcatattgtaaaataatcaaataatcagaaaataacaacctaacaacctatacaatttgaattttaaatctcttatcttaacactcccccttggtgcaaatatatttgccagttgtgtttcagatctgataaagggaaaggaaattactccttggcttaatttttccttgatgaaatgcctatcaacttccacatgtttagtcctatcatgttgaattgggttgtgggcaatctcaatggtagccttattgtcacaatgcacatttattggttctttacattcaactccaagatctctaaggacacttttaatccatagcaattcacaaacactatgagctattcccatgaattcagcttcagcactagatcttgcaacgaatttctactttttacttttccaagtcatactactacaatgtcgatcattaaatgcagtatctgtagtagtgtcactaagttaccttcgacaaatgtaaaataactagaagttgattgtctagttgttttatcccctaccaaatctgaatctgaatatccttcaacataggtagtattattttttgaatatagaagtcctttttctcggagttcctttaaagaatctgagaattcgaaagagagcctccatgtgtcaatactaagagcatgcataaatctaattaccacactaaccgcataagctatgtcaggcctagtgtgagatagataaattaatctacctaccaacctttggtatcttcccatatcagcagcaacttggttaggaaagatgccacgtgtattattcatttctaaggtgtttcgattggtttgcattctagcatcccttgttctgttaataaatccatgatgtactttctttgagagagaaaaataccttgttttgatcttgatatctcaatcctaagaaaatatttaagttctcccaagtctttcatttcaaatttggtgttcaattatctctccaacttcttcatttcatctaagtcatctccagttagaaccatgtcatccacgtatactatcaaggctgtaacttttcctttttgatgttttataaacaaggtgtgatctgcattggtttggttgtacccataactcctcatagccgatgagaaccttccaaaccaagctcttggtgattgtttgaggccatatagggcctttttcagcttgcacattgtctgttatgttttgggctgaatgctaattccagggggtatgtccatacatacttcctcttcaaggtctccattcaagaaggtgttcttcacatcaaattgcttgagtggccaatccctattggcagccagtgataacaaaatacgaatagtatttaatttagtcattggagcgaatgtttcttggtagtcgataccatacttttgtgtgaatccttttgctactagtcatgccttgtatctatcaatatttccatatgcttttaatttgatagtgtacacccatttgcatccaatggttctttttcctttaggaagaggaaccaattcccatgttgaattcttttggagagcttccatttctacattcgtagcttctttccactttgggttatctaaggcttcctgaacattgttaggaatacatacagtagataattgatccacagtcatagcatgtgagtgagataacctatgagttgatacataattggaaataggatatttggcttttgctttgatgtcaggttcatatagtgttttagaaatgcctttatttgatccgtgggatattcggttaggaatttcatttgaggcatgtggggacagattcaaatcagaaaatagtagtggtaaagactcagaaattacctttgttattgttgtgttattgatatttgaagattcaggaacatcgttggatgaataatcagttattggggttaaatgtggggatccatcatgagaatccggtgctttgtttgtaggagatgtaggtgtggaattttctgttgcattaggaagtggcaggtctgatgcagtgggagaattattagagtttggtaatatttcaaaatagaattctcctccagtattaaatgtctccccctgaggagaagtcccaagaacttcccctgacaaataaggttcacattcatgaaaagagatatccaaagtgacatggactttatgaagaagaggattaaagcacctgtaacctctttgagtatcggaataaccaagaaaaatacattttgtggcacaaggatctaatttatgccgtagaactttaggcttatgaacataaaccgaacaaccaaatatgtgtggttccaaattggaaatgtggggaatagaaaaatgggattccaaagtttgttgaggagttttaaaattgagaacactagaaagagtcctattacttaaatatgcagcagataaaacgacctctctccaatattttttaggaacatgcatgacaattagggatgctcgaacaacttctaacaagcgtctatttttcctctcagccaaacaattttgttgaggagtataggtgcatgaagtttgatattttatgcctttatcacgttaaaaggaagtgaagggtgcatttaaatattcagtcacattatctgtttgcaaaatttgaataagagaatgaaattgagtattaaccatagcaaaaaaaaaacatttaaatgcagtaaagacctcacttttggattttaagagaccaggtgacacgggtacattcatcaataaatgtgacaaagtagtgagtttgagagaaagatggtttcttggagggatcccatacatctgaatggactacttgaaaaggaacctgacttttattaatacttggaacatgaggaacacggtggctcttggccaatttacaagtgccacattgaaattcagatttattcaaatgagaaaacaaattgggaaacaacttttctaaataactaaaggagggatgtcctaagcggtggtgccaaagccaaatagtggcacagtctttattattagcacaagtaagaaaagattgaacatctagggagtctggtttgaagtcaaggtccaaaaaataaagttgtccatgtttaataccataaccaattttcgtctgagttgagatgtccagaaaaacacaaaattcaagccaaaaggtaatagtgcaattcaaagagtcagtaattcgattaacagatagcaagttaaattccaaagaagggacaaccaaaacagaatccagatataaatgaggggataaggagagtgagccttttcagtaataggagaagtgccaccattggttgtggaaataaaaggtaatggacaggaactaaaattatgcaactcagaggcatccctgatcatatgatccgaggcaccggtatcaattacccaagtatgatttctagacaaagtagagaaagcataaggtttaccgaagggaccttgatgagtcactagagcagcagaagtaggggaatggttcgcttgagcagcgacagtgggagcatcaggttgagcagcgacaacaacaacaacgggggtgtttctccgtggttgtttgttgaagtcccaccattcgagatagccaatcaattcaaagcatttctgcttggagtgtccagaagctccacaatgtaggcaaacatactgatttgattttccaaaagaagagggcttgcaagattttttaggtccatgtgtaagcaaggcaatagaatccaaggaaggacaagcataatccatggtctgtcattgagtgaactcttgacgtaaaaaggcatacaaactctccaaatcaagtttgggctccttgcgcaaaatttcatcgcggatgtggtcaaactcagagtccaatccattgaggaagatgtgaactcgaagtctggccatagcagagtgaagatgaacaacgccatcaacagtggaagtcggagagttgctacgatgatcaatttccttaaatatggccaaaagttcattgtagtaggtggctaaaggcctaccgttctgtttggtggtgaaggacctttgattcagtttgaaaaggcatgtttcgtcggagccgtcatagaatgtccatttgcaagcctcccaaatatcctaagccgtgtcgagacgcaggaagcaaggcataagcaatggatgcatggagtctgtaaaatcctcaaatcaatatatatatatatatttatgatttaaattataataataaaatataatttttattaacataaggacaaattttagcatccaaagtcgagtctttaaccacgtgaaaatttcagctgaaaacaaatccttaagacaaatcttttgaaagtccaagtgtcatcaggagaaacaaaatttattcaacaagcttccacgtaaagccatgcattaatgaggtgaaaattgtaatgattaacttgataaaaatctcccaaaaattagttacataataactaaactaaatcttacctggttataattcaaccaaataaattagtataaatacccctacacattagaaaaacttacaacactatcagctccctcttttcctaaaccttctctaccatttcctctcacgtaaaatttttctatcttaaaactagtccagacagtccctactcaattcaccaaaattatcaaaggtaggctaggcttcaatctttaacttagaaatttttaagattatttcagttgcttaaatggacagattgagtttttattctataattgaaaatgtccaggtgataatttggaatctaacttattagtagtttgggaaggtttatgagataatttgaataatttagataatttaaataatttaattcttgtattactgggtaacaagtttaaaaacaagaagctggaaagtaatagcctatttaaattttatcgaaattaattgaacaaagcaaacaacactaatcccagcttttctttttctcagcctgcaagctccccggttgtcatcattttaagcacctaaagatacccttggttcagcctttatatatatatatatatatatatatatatatataaaatttttcctgtagagcttatccatggatgaatagtagtataggcaataagtttacacacgttaaaaataaaaagctagaagttaatggtttatccgctaagatatatatatatatatataataataataataatacctaagataacaccataccagcttttggttccctcggtttacagcaccccggttttcccattatatggtgatactaccatctctctaaaacatcttctggccggcttgtataaaagtaactcggcacccatgcaagtactgctactctacatacagccggcactcatggcaactcggcaccacaacggcaagcccagccatgcatacaaccggcactcatggcaacccggcaccacaatggcaagcccgaccatgcatacaactgacactcatgcacaaccgaacccggccaaccatgaccccggtcactcatgcacaatcgaacccggccaaccatgaccccggtcactcatgcaaacccaaccacgaccctggctctcggacttcccggcccgtcctcatttgttacccaattaccttggcaaacaccttgctatttcagacaaactagtgatactaaaacttagcacacacatcccggcctcttcactgccggcttctatactcctctcttggtaccattataattacccggcatctcggcaaatatatatatatatatatatatatatatatatataacatgcggttccattcgaaagcaagttagtacgatacacctcggttttatccttaaaaatatacttcgatatatatatatatatatatatatataggtatagcatctttaggccaggcaggatctcacgtgaaattttcagtcattacataagtatgcacacccatttgaattagttatataaaaatattttccactagcacccgtgttggttattctcagccatatatatatatatatatatatatatatatatatatatatatatatatatatatatatatnccatgcaggatctcacgtgaaattttcagtcattacataagtatgcatacccatttgaattagttatataaaaatattttccgctagcacccctgttggttattctcagctatatatatatatatctatgttaactaaactaaataaactaaccaagtgaaattcaacgtaataatatatatatatatatactcttattaaatatattcaattcttggtaaaatatagtagaaaataaatttttaccgctttaatgtcacaaacccagtcttggttagaaattaaatcatatcttataaatattaaatagatttatcttagttggtataattttacgtggacaagttgtaaaaggttaactaccttactttatggaagaagaataataacttccttatattataatttttttttagatataaataagattgatctaggttttaagaccagacctatgattttatgagaatgacccgagtttcaaatgttggagaccgggcctatgatattacaagaaatcaggtgctaatacatggaaattcatgcatgattagtgtaagacggccgcagcattcctacatactgtacatatgtagaggccatgtgcacctgtgaccatttcatttcatgcattcattccatcattgaagcattttatgtatttattcaaatatgctgatttagttactaacctttctaacatgcttgatggtttagatttgcctactgagaaatttatttctcactagatttatttaatgttttattttagatggttacaatcatactatttcttgacgcactggatattgcatggtatgtggatgaagtcagaaactgttatgtagtaactatgcagcctgttttgcgtgctcgtatttacttcggcgcccattttccaatctctgtatttagcaaagattttaatccagccgatccgttccttcaatttactcctatgtatccgaatccggtcacagaccccataatcgtactcagtgaagaggatagtaccggagactatgtttaaatgaggagttgtgaactttgtaaataaataaaactgtttgaagcactatgatgttgaaatgtaaaatagagctagtatgaatatgatgatgtaaaatagaaggggcatgtaatatgatgtatgtatatatctagttccttttgtttttaatttcttttgtttctacctcaatttctatttttaattgaaagacaaaagaataaaataaaaataaaataaaacaaataatcaaataattaagtaattaaataaataaataaaataatttaggatgttacagagtcaatcagccagctcttgaccctcatgttgtcggtcacccagccatcgaaaccaagggcattaggcttgggttgcttcgtggctctggtgagatagtcatgtttgttcctaacaccgattcacatatccattagttgggaccataatggatagttcgattcatcaaggataatggacacgggaaatgatgagttatcttggtggatgatgatgggtgaggcgacgacggagtgagaaggagatgaggcattgttctcgacgacagtggtattagggttgttggattgggatttcatttgggagtaagtaaggtaagggttgccattcgggtgaggaaaaaaaatatgcaggtgggtaagtattcggttttcaatttcgagtaggaaaaaataaaaaagaagcaaaggatcagaatctatgtgactgataccatgtaaaataaagtacctctgtttcttattcattttgttcctcaaatgaggtgtttttatacaaagctaagactaataaactcagctatataataggtaacagaaacaagctaatttaactatatagtgagtaacaaatttcctatttattcatattacaaaataatcaaataaacagaaaataacaacctaacaacctatacaatttgaattttaacaacctgagcacaataatgttaacaacctgagcacaatattaggaaacaataattcaaactaggaaataataattcaaacttattcttatctagactatgaatcagatccatggcacccttcatgaataagagtcatgtttcttctgctgccactagagtctttttcttccctattccatatccaaattatttttcttcttcacattctcaaacgtacaactcattttatcttctcgtatcagtacctgtatttcacttttatttctctcaaatcactaaatccccatgcacgtattccatttgaaggtcattgatgtgaagtcaattgcactattctgaatccttcatagaccagccctgaagtctattgacttgaacatgtgattgttctgaatccattctcgtatctcaattctccatgcacgtattccatttgaaggtcattgatgtgaagttagttgcactgttctaaatccttcacagaccagtcctaaagtctattggcttgagcatgtgattgctctgaatcccttctcgtatctaaattctttttctacctcacataactgaagcacctgctgtgaactatcctgaagcacctcctgaacctattgctgatcaaaggcattcctggaagagtgtttgaagaagcaattgacaagttgggcatgaccgatattcatgcaccaacttgaggggcagtgttgaagatagaatttgaatttgaattattgtttctattagataggaatagtttgttaaaatagtctagataagaataagtttgaattattatttcctagtttgaattattgtttcctaatattgtgctcagattgttaacattatttgtataaatatacctcatttaagaggtgaaatataaatgaaagtattaataaatgagtgaacaaatgagtgaatgaatggatgaataactgaatgaagaaataggtgaacaaatgaataaagaattattatttcaacttatgagtactctgatttttaacatatgtgaaggaacattacaattgatcactcaatgattaaaaatcttcatgcaatcgagtttgtcagatgcattatagttaaacatggttcatcgtatcatgtgtgtatattgttgcggatgattttatgatgtgactttgaaaatactttttggttgctattttatttcttattacatgttgtgattatcatttttgtctgttttgatgtacatcattatgcacgtatttttgtgtgctaatattttgtaaacttatccgtttgtttgttgtgtgtgcgtgtgcaatgattcagtaacgtttgtgttcaccaggactaggggtggcaattcgtgacacgacctgtcaacccgtcccggacccgacaaaatttttttgtgttcgggtcaactcgtttaataaatgggtcgtgtttgggttgaaaatttttaacacaaaaaaaatcgtgtcgggttacaggttaacccgctaacccgtaactattattttcatttatttttatatggttattatagtaatttgatttgcaggtataaaatcaaaaagttaaaattagggttcatacttcagataccccacctctcaaatcttttcgaatcgtcccaaacagctaaaccccaccttacgataaacttctctctccctctctagctttcactttcgctttctggtttcgatttttgggcactcgaactcatctaatctatcaccagaaattgattatttaatgtcaataaaacaaaaatcacttttatataaaagaatgaaagcagtcatttttttcaagactaaaagtaactgaaaatgattttaaatatgaaatatctttgtagcgtgtaggaactaggaaggactcgacagagcttctggtaattgttgatccacatgcatgtttcaacatttttatttattatattcaacaatgctactaagcgtcacatgttcatttattatactttttaacacaatgcatattcgtttattatattcatgtacttatataaatttatgtgcttatacacatggaaaaatgcaaggaacgctaaagcattattgaacttgtaatcatttatcatatgcataggaacctttagctgtggtctctggacatgtcataatcaactgaaataatattaatgataaaaaaaattctttttctaataagtggaaagatgctatttaaatatatttatttatcttcatttttagcaatatatatatatatatatatattaaaaagcataaataaaatcacagacacacagatttagaataaaattgctttctcatttgtagaatagatattctaacttttcctttgtatatgtagatggactttgaatcacaaaacaaaactgaaatgatggacggggaggttgatgttctagatgcaaacgttgagggtggtaatatagttgcagtagacacaaaaatttgccaccaaagaaaccgagaaagttatcatcgaaggtttgggcacacttcgagcgcattccaataaataaggatggttgtaaaattcaagccaaatgtaagtattgtgaacaagtatacatggctgatagtaaatatggcactggtaatttaaaacggcatttggatggatgtgtgagaagagatactagagatgttgggcagatgatgctttcaaatcaaaatagctccttaagtttaaatcctaaatttgaccataagaaatttagggagttattgattgctgcccattatgcatgatttaccgtttcaatttactgaatggcaaggcattagagctcttcttctttatttgcgtgcggatttgaatattgtaactggaaacacagtgaaggctgattgtgttaagttgcataaaagggagaaagatagatgcttgaacatgttaaaggagaatcctagtagagttagtttaacatttgatttatggacttctttaaacactgatggatttgactgcacactttgttgacaagagttggcatatgcataaaagagttctaaattttgggtttatgccacctccacatactggaatctcattggctgaaaaaatccacacctttttgaaggattgggggatagatggaaagattttttcaattacattggataatgcttttgcaaatgatgtttgtgttcaatttttgagagatcaattgttgattggaggtggacttttatgcaatggtgagtttttttcacgtgagatgttgtgctcacatattaaatttgatagttcaagaaggattgaaagaggttgatgaatctgttgtgaaagttagggaaagtgttaagtatgtgaaggggtcacaagcaaggaaacaaaagtttttgcagtgtgttgctcaaagttctcttccatctagaagaggtttcaggcaagatgttccaacaagatggaattctacttttctcatgcttgatagtgcactcttctataaacgtgccttcatgcatcttcagttaagtgattctaactacaaattttctccatctagagatgaatgggacaggattgaaaagatcaatgagttcttgcatgtattttatgatattacttgtgtcttctctaaaaccaagcatccaactgcaaacctttactttccttatgtttttactgcacatctgacattacaaaataattgaaaagtgatgatgcttatactgtgaatatggctgaaaagatgttcattaaatttgacaaatattggtctgaatttagtatgattttagccatagctgtcattttggatcctagatataagatgagttttgttcagtggtgctacaataagttgtatggtgatgatgggatgaatgaatcaacaaaggtgaaagacaaactagtttccttatttaataatgagtatgcaagtgatggaatcagaaactattcatctatttcttcaacaacgagggttggagatggtgggagtgagacatctaatgaaacctcattttctacaatatctagagatgttttgagtgtaagttaacttaattatttgtcttgtaattatttctattattgtgtatatttattgattttatttgttttataatattgttaggaatttgatgctttccatgaagtaattatgccacaaaagactcaacttgaattatatttagaggatccaaggattgatagaagaaatgttagcttggatgtgttatcatattggaaggctaatcaatttaggtatcaagaagttgctgcaatggctagagatatttttgggatacctatttctagcgttgcttcggaaagtgcttttagtgttggaggaagagtgcttgatcaataccaaagtgtactcaaacctgacatagttgaagcattgatttgcactagagattggttgtatggagagcaaggtaatattcattatcaattacttattcattatctgttcattttaaggattttgattaattaattttctacgccatactttcataatgcctcgttgttgccagagctataggaatccattacttaaacttatttggaagcatgctttctgtttacagtgatgaaacaaacaatgtttttatgtgttaatatactgtggtcattacctatgacattgaatgatcctctttgatgatatattgtttgtcactctaattgtgattaattttttttttagttcttgtaaagcattcagcagtagctttggaagagttgacaaaagatatcatggaacaaataagtcaacattcaatagttgatcatgatcctcaaaatagttacttagttggtcaatgacttttatatttcaatcagtaacataattgtggatttgtgatcttaatgtgtattttggtggaagaaattactttaataatgagacatttgttgtatgttgcatttaattatgttttcatattagattgatgaagttaaatgtaacttattttgatttgaattatattaaacagattaaatatgatttgaattaatatcattttgtttttacttgtgtcgggttgggtcaggtctgtcgtgtaaaaacaagttgtgctcaaattcaagttgtatcgtgtcaacccgtgtaatcaacgggtcgtgttagggttgagttttataacacgaattgttaatcgtgtcgtgttcgaattgagcttattcattttcgtatcagacccaggtcgacccgaatccaaaccataaacacgtattgtcacccctaaccggagaaggtggcacgaactcaacaacatctaggcaccctcttcatttagtttgcgaaaacgcctatagggagaaatagagcatggcgtgatgactttctctttccattttttcttattatggaatgctctcagtatgttgtattagaaaaatgcaaaatacaacaaaacaccagcataagacaacaaaaatattttcgaaaaaaaaaaagagaaggatcggaatgtaataaaagcaagcaagcacaaagagtaaattaaattcagaagatatgattggttacaacatgcttttggtttaattttcctaattttaaattatgaagatattttccaacgttattccactaatttaaagttttaacaaatataacaatggagtatcaaaattatgtgaaaaatggaaccattatcttattggagcataaatattagattttcagtataacgaaccttttgggctttagccttataaaaattgatgaaaccatcatattttttattgtagaatttgggaaggtgtgattgcttctcgatttgacctctgcatttttcattaatgaaagttcagtccaagttgtgagggcgagccctagcagtagcacaaagatattattgtattttggtgacattgtcatgggttcaaatccaaaccaattttggtgacattggtctctgtaattttttcgttctctgtagtacggttgcagggtttgttgaacgtccagtcaccagtggcggtggcacacaagggtggtcggtggtcggtgcccggtgggataagaggaagatgaagattgatggagacagagagaagaaagaagaaagaggtaaaacggaaaaggaagggaaaaaaaagaaaaagaagaaaacattttgaccgtcaatttaaaaaataaaaaaattaacggtgaaaaaaccctctcgcacacgagcctcggctacatcaattctcatcaaatttaaaattaattagtcattcattttaattagattatatatattattttttagatatagatatgttgagccaaaatatatataattgtatattattattagatataaaatgtgagtttaaacctaacttaatttcaaaagttagtttgaggaatgaaagatgttcctcacttatatattttattttgacattatctctaatcaacgtgggacttgagtgtttttcaagtgagacttgggtgtttttcaatattatctatatatatctttttattttatgagaaaaaaattattaaaaatagaggatcaagatacaaggtacccacccttataaaacaacatcacctgtaactatctagttaaattatattaatcctctacccccaatatggcatcattccctcctgaaaagctaaatgaaaaatcagcccacaaaagcacatcactaaatgctaaaaccatatcatccctcactttccctggaccatcccagcatgtttcgtgtgcctccaaatacgcatgtccgaactttgatgcatacatccaaaaatcagaccagaaaagtatacccattaaatgcagaggtattggttgtgtttggagtttctgaagttaccggttctcaaattaaaaatggtggggacatgttaatctttatagttttaaaaagttagaatgaaaagatctgagtgttttgtgggacccaatttaaaactcaaatagagatattagattggagagaataagtaggttgaaggtttttattagaaccactaaaattgaataatatagagcatttaattgtcaaatctggattaaagatttaagttatagatatgatttttactttatcttctaataaaggaggaatacatatctctaatacacggagaatgcattctcgaataagaatattgaagatttgtataatgtttataaaacaaattatttctttttaagattttaaaataagatatactactaaaaaaatgaaggatcttacattttacatgtgacgaatctattaaaaagtaatctaaaatcctaaattaaaatttaaaactatatatgtatatgtgagattcaattaaaaaaaaaccaaatagtaatattgcgatggtggagatcgatgctctaagaattgtcctgagtctactttgcccaaaagatgtcataaattttgacttcaaccaatatgctcccctgagtgagtgtagtaataaacattggtattgtgttgaatttttatagataaaaagaaaaaaaaaatacttccatgttgctaaatttgatataagcaactggcaggatctacttgccacttaacaaaataatacttgaacgatggatatttttattgaatattgatagacattttccttattagataataagatgtgtacaatcagttcagatcagtctaggccctaggagaaagatgaacctgcaatgcatttttcatcacaacagtgaattcttgtttctccgacaaatccacattccctccctcaggaaccttccactcaaaattccaaaccaaattagccacaaagtactccaaatgaagcaaagccaagttatatccagggcatatccttctcccagcaccaaacggcatcatcttaatctctttactcccagttatatcaaacccttcatcattcataaacctctctggcttaaacgccattgggtcctcccacaccttagggtcccaccccatctccgccaccatgaaattcaccgtcccattcttaggaaccaaataatcattaaaaaccacgtcctcggtgacagcatgcggcaaaacaaagtggccaggtgggtgacgcctcaacccttccaaaatcacagctttcagataaggtagtttctgcaagtcgtcttctttcacttccctctcttctctctcaccaactgcttctctaatctcatccaccaccttttcttgcacgtgagggtacttcaccaaattcgccattatccactgcaacgccgtcgaagtagtatccgtacccccgttcataaactcgctacaaagcgtcaccatttccatttcgctgagcttgcgtttctcctcaggcagttccaaatccaacaaagtgtcaacgtacgagactacgacgtcgtccttggctcgcttttgcttcctggctcttataagcgggacaaacacgtcatctttctccttacgcaacctcagcaactcctcccaacgattgcggaacaaaacccgcatgactgggttccagaaattgaggatgttgaacctgttcatgcgcagaagcagttggcgcagcacgcgctcgatgtctctgactttcccttcgtcgagtctttcaccgaagcacatgaacacgagcaagcagaacatggcgtattggaagtggtcaatgacttttgtggagtcgttggattgtgaatctgatttgagtcgcgtgaggagggtgtgtaggacccacttgcggatttcggagaaggacttggcgcgtgaggggtggagcatctcggagacgaggttgcggcggagggtgcgccacgtggggccgtaggaggcggagttgatgttgtgctggttacaagttaagattttgccgacggcgagggccttggggcggtcggagaagagggaaccgttttggattagggcttggtgggccagggttctgtcggcgatgaagatggcgcggtgggaaccgattgggagagttacgatggggccgtatttggtgtggagggttcggaggattagctcgagttcggagaaggtttttcggagccataggaagcttgtgatgatagggatgttaggagggcctggtggggtggttatggtttttttgtgaaaaagggagaagatggctctgatgagaacgcagatacagagagagacgatgaggatgaagcagggttccattatgtgtggtgctggattgtgcacttcacctttcctcgagaaagacagagtgagtgttgtagtcctgtagatatagggtgtgatttgagaatcaaatagcatgcgctattggctaaaaggatatggattgcaaaattataaaaggaatagaataaataaataaataaatagattctttttaaaataataaataaatattattatccaattgttcttaccgaaatctgaaaattctacgtatgagttagagtggcctaggtggacttcaaattatgtaatgcttagagaaggcacctacaaaataaaggaaaaacactctgacgcttaagtaagtacatcaattgttcaagagtaaagtaagtacatcaattgtttaagagtaactgagtgtgagaacccagttaagatatagagaatgagtagctcgagtaatgcattcaaatactgtataccgaaaagacaatgtagtgtgtttagagagaacttggatgattatatttatagcgtggaatatgggccttaggccattgcttattaataatctgttgataagataataataacatataataacatgcaattatctaatttcaaataggagatgtttaccttattgatgacgtgctgacgtggaaggtgtctacttgtacggttaccctttaaaatatgatcacatattattttactattttgaactgtacaccaatcaagtgttaagtatgattagatttcggttaatcttataatttgtttgagacgaaaatgtaataatgactttaggtcttactaggaaatcaaatatcttctcccagcaattatagataaagttaaattagttatcttttacaataatagtaatctttatatatttatatataagtagaagtaagaataattatatcattttttccattcaatttaaggctaaattgtatttttatatagttttcatcctaaaatgaaagtattttctcattcataattttaagactaaaatagtaattttaacttttcctatctttttaagtgttattgtaatttttttattggaaatattaaaattttatacaacttatctatgaatgatgtttatatttttttttcttatcaatacattcttcattttttattggaaagcatataaattatattttttaaactaatatatattctatatatatctatatatatattctatttatgttgcgctaatatatatttatatctacctatcacacatataattatactagagaaatacattgggatttttttataatcatatgttttttatgnnnnnnnnnnnnnnnnnnnnnnnnnnnnnnnnnnnnnnnnnnnnnnnnnnnnnnnnnnnnnnnnnnnnnnnnnnnnnnnnnnnnnnnnnnnnnnnnnnnnnnnnnnnnnnnnnnnnnnnnnnnnnnnnnnnnnnnnnnnnnnnnnnnnnnnnnnnnnnnnnnnnnnnnnnnnnnnnnnnnnnnnnnnnnnnnnnnnnnnnnnnnnnnnnnnnnnnnnnnnnnnnnnnnnnnnnnnnnnnnnnnnnnnnnnnnnnnnnnnnnnnnnnnnnnnnnnnnnnnnnnnnnnnnnnnnnnnnnnnnnnnnnnnnnnnnnnnnnnnnnnnnnnnnnnnnnnnnnnnnnnnnnnnnnnnnnnnnnnnnnnnnnnnnnnnnnnnnnnnnnnnnnnnnnnnnnnnnnnnnnnnnnnnnnnnnnnnnnnnnnnnnnnnnnnnnnnnnnnnnnnnnnnnnnnnnnnnnnnnnnnnnnnnnnnnnnnnnnnnnnnnnnnnnnnnnnnnnnnnnnnnnnnnnnnnnnnnnnnnnnnnnnnnnnnnnnnnnnnnnnnnnnnnnnnnnnnnnnnnnnnnnnnnnnnnnnnnnnnnnnnnnnnnnnnnnnnnnnnnnnnnnnnnnnnnnnnnnnnnnnnnnnnnnnnnnnnnnnnnnnnnnnnnnnnnnnnnnnnnnnnnnnnnnnnnnnnnnnnnnnnnnnnnnnnnnnnnnnnnnnnnnnnnnnnnnnnnnnnnnnnnnnnnnnnnnnnnnnnnnnnnnnnnnnnnnnnnnnnnnnnnnnnnnnnnnnnnnnnnnnnnnnnnnnnnnnnnnnnnnnnnnnnnnnnnnnnnnnnnnnnnnnnnnnnnnnnnnnnnnnnnnnnnnnnnnnnnnnnnnnnnnnnnnnnnnnnnnnnnnnnnnnnnnnnnnnnnnnnnnnnnnnnnnnnnnnnnnnnnnnnnnnnnnnnnnnnnnnnnnnnnnnnnnnnnnnnnnnnnnnnnnnnnnnnnnnnnnnnnnnnnnnnnnnnntaacaaaagagtgtatgaaataaaaatgtatgacatgctatatgtatatatgaaattttagtttcatgagagagaaacaatattattaatggtataatttaaaataaaataactctctaaatactattgttttattaatagaaattgaacacaataccaactaatatacaatacacactcttgtttaaccaattgaattaaactcctttaatatcatctaaattttattagtcattaaggatgagattatatatttaatctttttttataccttggattaattagacaaacacttaagctcctttctttcatatgatcaccttgcccatataagcctaaattaatagatatttatacatccttaaaaaaagatatttataaaaaagtttagagagatgatatttcacactattttaaacttttcaataatattttcattttttttcctttttttatcgcataacaatatctattttttttcttctctcaatcacttgatgtaccataacatttgggtgtcccgacaatatttatccaaatgtttatgatgaaggagtgggacgagaatggattggtcatgatgtgctggcccaatcgagttgacatcatgacatgcgaaattggtattattttcacagttttttacgataaggtggtgatagagttgcaaacttgtacaatttggcatcatgaagtagagaaaagtgtgaagatagctaaagtgaatgtaagtatattatatggtctccttttgattgatatccacaaaatatctaagaatcaaactttttaaaatatctcccccaagatagtggaactttgcaatcttcaagttcaaactatatccgtgtacggatttttaggacttctatttgtcaatcaccaatccctcatttagaatcgtaacaatttcactccatataattatcttcgattttcacgaaatcacacttaatgaaaatatactcaacgctaccaacaaaatgctccagctttttcgattatgatttgtcaaaaatttcctccatctagtatatacctcgatcgcaagatgtacatgcctagtattttggaaagtttatcagaatttgtaatatgtatctggaatctatgacttacgtgcaacatacactaaaataatggaggaattgtatttaaagggtgcatgctatctttctctttttcttttttcataatagctacttgaacacaatagatgatgttggggtcttcaaagctacacgaaccatatatatgttatgggtcatttcaagattggaattagagttgtatttgggtagattcgggttgagtttgatgaaatttataatttaatttaattaaatttgaacgagttaattttgatcattgtttttaaaaatgaaatttaatccaaatcaactcaattaatggtttgatttaacgggttaaaacatttaaatttgtttgttattttttaaaatctattttttattaaatataatactaaatacatgtgtagtcaaattgtgaaaaaaaaagattagtgaaggaatcatattgttgtcatcatcatcatcatcatattgaccaatatagtgtgttaataattaaaatataataaacatattcaaacaccaaacacacaaactaaaaccctaaaactaaaacttttgccgcatagtttaaaatttttaatattttcaaatagtcaaataagtagtgtaattgaaacttcaacttaatctacaatagtttgaaacaaattaaaaagcaaaacagatgctctacaatcaatttggacttgaaatcctaattttgcgagagtgaccaaatgaaaccgtgggaactaagaaaagaagaaatggtttcactcttagttattaagtccatagttgtgaaattcagtcagatcattgactcgatggaagcagtggatcaatgatccaactggtaaaccagtaattgatctgatttgacttgacatatattaaaaattcaaaattatatgtatctattatatataaatatataactaacattatttgagtaagaaaaatttatccatatttcaaaattttaaacaacaattaataataatccaaaattcaatttttattttaaaagaaaatccaaaattttaaattctttttttttaaaaaaagaaaattaaaatccggccgggccgaatcgatccaaccgaaatccggtgacctacccggccgggttcgatcgtgtcaattacatgaccggtccaatagtgaaaccaacctggttaaaccagtcccgatccaaccggccgaaccaaaccgggttaataacactgattaagtttgataataatagtaattaattttttaaaactaaaaatatatattatatataaaataaataataataataataataatttcatacaaattaatggatcaacgagtccagatattaaaactcactatccaacctcaaatcaacggatttgaatgaattagattagatttgatccaaattcaaaaattatccaatccaaactatttgagttaatttggataaatccataaacactcctacatgcaaggttatgtagccggtcggttctttcacttactgtttagtttgtatttttgttattgattcataaactggtgttaatatagatgcagcatgcttgtttgtggggtgagagtatgacaaggaatgtgatagacaaggaagctactaacagactctgcttgaagctgagataataataaacaagaactttattgagtcttttagactcaccaaaagccacacaatgaccaaacttactaacaaagtcaaactaaccaacaaagggaagttcacagttgcaaggcaaatgaaagatgtaactgcattcatgagaagtcgtgattgtgttgatcaatgtgtactaacacttcggtacacctcgatatatatattgtttctttaaaaaattctattgtttctttaaagtaaagaaggtcacttatgttaaaagaatgttacataagtttggaaaaaaaatccaatatataattctttttaatataattttttaaaatttattttagatatcttttatcgttgaattgatcctgtactgtgaagataaacatatgagccctgattttggccccagaaatgtgccagtacatgattatgaaacatttaagtataaaaatttatcttgtgacttgagtgtcatgtttaaatgttatgtcaaaactgactcaaagataaaacaagtaaaacttaaattttagactcacaaaaaataaatattttttgtttatttttataaaaccaaaaaacaacatatattaacaaaaatgtcatattttaaacaaaaaaattaatatataattttatttaaaataaaaaattctcttaaaatttattttaaacctcatttatccgttgtactaatccaattgtatttcatggccccccaaatgtcacagttggggcttcagagaagagaatggagcttttgtgttggctatgtcagattgggatcagccttgtctgccagtgttaaaaggggaagcttctagtatcctagctcttaagtggttaatggattgtggtttgacccatctggaatttgaattagattgcagagtgccaatacgattgactttgtttggcaccaatcgttttatgagagggtaacatatttgatactaaatatactctttttaatatactcttgtaatttaataagttaatttgatcaagtctgtatgtgaggattattaactttgactttaaccactaataatcagttaatgtatatttattcaaatataaattattatatactcaataaataaatcattagtctaagtagagttggatctttgtaaataaaatataggattcaaacattttaaatgaaaacgtaattgaaaaaaaatcttttaaagataaccaatcaaattttttaacaaaaattaattatcaataaaaatatatattcacattaatatcataataataaaaaatccaatttattacatactcaaataaataagttcagatacagtaagctcaattatttaatacgttaaatacaaaataattaaaattacataaactcacaattcatgaaaatacttgcatatttgatctttcaatcataatttatattaaataaaaaaaatgtgatggttttttttatttactaaaattctatagtattagtactacgtattacaatttaagtgcatattcctatttgaatagttaaaataattattagatactcaattgataaaaagagattttaattaaaaaattataaaagcaaagacattttttgatagactaaattgtaaaaaaatttataaacttttttgacaacaacgtcgattgagttcaatctaattaaaaacatgctttaaaagtcatgaaatcaataaaccaaacacacacccaatctcaaactttcgctcacataaatgaactaaacttcaatatttttacaagccaaacctaaacttaatcatcttctaaactcaacacacttacatctcatttaagacatgtttggattaaaatttacaaaaatatctcaagtcttgtttctccaaaacttaatttttgaacaaaattttacacttaaacattcttttgaaaagtttccaaacatgatctcaaactaattttactcttaaacatacttttaaatctttccaccagaaatccaaacacacccgcatatgattatcttttgtgaaccacttaaatgatacgcacttaatgcttctttcttggttcatgatttacaaattacaatcaaggcttttttgaggattctagtctgatggagacttatcccaagacagagaaggtctaaaaggcgggagggtttttttttttttttcaactgtttagagataatttacggatctaacgagtgagataaataaatcttcatgaatttaaagtctatctaagatgtaagatgagtccaaatacttggtgcatcagaacagagacattcacttttttggtgttagatttcttaccaaaacattatacaggaaagttaacaaattagtcggttcacatcattgggaatgttagcatagacctcatatttctgtttaataattatttgtaatgtcctgacttatttagcctagtgcggatctgctacataaattcaaagcaacaatgaaaaaccatgcaacaagagcgagtcacacaaggcaaatattcgagcaaccacagacgaaaaccacagacaaaaatcgcgtcattaaatcaaagtataactttggtaacaataactgcacatctaatcttctacaagtgccatgaacacagcccaaacattcattttataacaagaaaatgtaattaaatagagcaaatcattctcaagaaacaggaactaagcatctgaacctcttttggtcgctcaacggtagctacttaaagggtcagctgctttcccagttctagcatcagtccatgcttttgcaatggttttcttcatctcatcgtccccatcctcatacatattctgcaaatattacatgcatagtaaaagtcaatttgaatgttccaagggtacatagttacatgcataaaattaaaagaaagtagcttcagccaactaaagaaacaaaaaagaatctgaccttcatcatgtccataattcccgccattgggtctttccctttgtccagatttggcttaagctgtaacatcaacacaaaagttactattttatcatgctgattaacagggggggaatgtcattttaatcttcgcatagtactaccttgtcttctttgaagtgcaaatctagccagtttcctttggaagccttcaccaatgtgatgattgcccttttaggcttgaccacaaccttacatttctccggtactatctcattgtgcaattttgatattgcacatcggtagttctttccttgaacatcatggaacttaacatcgaatgacattgacttaaactcagattcaaccttattctcatcgattccctccattaacacatatatctgtcaaagaacgaataaaagaagcataatcatcaggaggaatttgatactgttgaccaataatgttactgttaacttacagtgtgcttgggcgtatgttattaatgtgtaaactcacatcagtttcataaaaagatgcggaagctgtgggttcttgcctctatcttacacgtgtacaacgggagaagatgtgtattcagacatgctattaagctattcttttagactaaaatgtaatgacaataaaatggaacttgataaatatacttcacccaattttgttcaacacctctattcttcttcctctaatttttggaattacaaaataaaatgaacttatatttacttatctcttaatatattttccattcctttcacttctcaaacaataaaaataaaatcttgtccatggcaaaattccaaattgtatgtaattttatttcattcaactcctcaattctactgcattccatttgtttcaaacaaagccacaagggaaactcttatcataccatcacagaacacccacaaacaacgtaatatgcggaattagttcattctacaggtgattaattacatcattacatcacatggacaaaagaaaagttaaataagcaattcagtttgataattattcaacggaaaatgcatccctatccattaacaagaaattattaggcaatctcagaccatcatgtatccatgataattatgcaatcaagattttcactttatgaaaaagaattaacacacctcaactaggtgtcatggtaggattaactaagacgaggttatcaatggcggatggcagaaggccaaaattccgccatataaacaagccatcgtggcctatggcactgccatagcaggcctgccttcacaaattgcttatggcagagcactgcgttatggtggcgctataacaggttatttaacaacattcttaaaaacatggtagtctcagaccatggaataatttctcattaaccactacgacacaaggtggcaattaactcatgacacaaaacatcatgcaagcttattggttaaaacagaacaaccaaactttgaactctggtgaaaaaaaaaaaaaaatacagttcaattcaattgattaacattcagatgtatactttcaaaccatgatgccaattatatccacaaattataagactctttaccttaactttgtcactatcctgatcccaactgaacgacgcgagtgccgcatacttcagcgcaggtgaaggcgccaccttagttccggtcgaaatcggtgccggaatctgcgcagaagctgcctctgacgataactgcaaaatcatctcacaatttttttacacgaaggaatcagagagcgataagcggaaataattaacaaaaatgcaaagaaatttgtaaatttgctataaatgagaaccttttcgaggttgcgaatttcggaggagagtagagagagggttcgaggtcttttggcgatactgtggatgtggcgaagctcctccaaatccaatgccaagtcttgcgccatttcttcactcttcacagaatcagaaattgaaaccgcaacttcagataacaaataactattctaagtttcttacaagtttgttgttttatattgcattattgcggtttggaaaatgctagaatactaggaaaacattgtattaggggcaatttggggttatcctaagttgtttttattagggttattactttcccacttagcatggaagattctagagaaaactaggatccggcctaggagacctggttttagttttcgagagatctacgctgggcctcattttacattgggcttgttacatatattgaaaatgattattgcttcctgcactctctttttttttttttttttnnnnnnnnnnnnnnnnnnnnnnnnnnnnnnnnnnnnnnnnnnnnnaaacaacttgcaaagtcaggaagcaacagcataaaaaaattcacctacttacatttctgtatccattataaagtatttaggactacttgaatgacagattgtaacttttgcatagatttttattttaaaggagtcgaataattgattctcaatatgtgaaccgtaattttagaaaatttaaatccaggaaattagaaaaataataattattacataatttgttacttgtgtaacaatgtttaataattcctttgactgatagctactaaccttacgagttattctttaaagtgtgttatcctacaatttgataaggctaacataaaaattgtaataaaaataggttggcaagtagggttttagagaaaaggcaggaggcaagtaggattttttctattcaaggaaaagaaatgcttcttcgtagcacaaaaaataagtttgggaggttgaaggagggtctttgcaatctatggtggatatttaattgggtctcacgagtctgtataaggagaagcttttgaaacttgttgggggcagtagggttttgatgatggatgtggatgatggtctgctagatgacattcctaaaaaatgtgttgattgaggtttaaagaatcttgatgggccagtggttcctaaaaaacgtgttaatgcattaaggaatgaagaaggttgattctagaatcttgaaggcgaaactccaaagacgttggactgaatggcaagattcaaatcattgatttgcaagacaactattatcaagtggtgtttagtagtgaagaggattacaagtttgcattattgtttgaagggccatcgatggtgattgatcactatcttatagtgcaatgttggaattttctttttcttgatgcatgctaaagagtcacacaaagttgcactacggatctaaattaagtttcttcctattgaattttataatgatgtttatgatcgaggacgtgcgtatgatactagccaggcaaattccttaaagttgatcacttatcatctattcactctcgagaaaaatttgtatgttatgtgctaaattggatttagagaaacctttgcaaattcattatggtttgaggtttccaatattttctgaaagttcatatgaatgtaatcgtttgaaattgtcatggtacaacaagtaaaggttttagtagcttgattaaaaatactatgaagcgttatctaacctatttcatatatttcacacacgactaaaagcataaggtaaagaagaaaaaaagttaaagcttaaggtaattattgcacaatgtgagacttgaagaggtgtgtatgttaataagtcaccaaatagttggagaaaagctatccaaggaagcttttctttaaactcctttttgttgttatctttctttaaaataagctcttttatttttttaagagccttaataagaagatatttggcttagcttctcaattatttttaagagcttttataaaagttggaccaaacactagatgaattgcaaattaatgattttttcacatttttttatttagttccgaattttatttgtaatgccttaagagcatatttgtcttgaattagtttcctgtcagttttattcttttttatgtaatgtttagaatgataagaataacttttttaaaattactcttgattacctcttaaaaaaaaggtctgcaaaatcttcattgtcacgttacttgagttcatatgatttgaattgctcttgttaattgcaaatcattaagaggtatgcctaagtctgacatagatcactaacaaactatattatgtatctctcgctgggttaagtgggaattatctatttctaaatatttcggtacaattaacaatcttagcaatccttgaccaaagtttagttactcgacttattgcttctctcttgactcttgatcatctgtcatcagagtagtccttttctttttttgtcaatacaaacaaaggactaagcctctaagaaacagattcaagttcaacagatagttagccattactcttcaccccaatcccttatcttgcgtttgcgtaatcagaatactctgaagctgcttttgcaactgtgcttttacttgttggttataatcaatgtttctacacacattctccttttcagccaggagttccaaccttctcatttcagcggcagctatctccgaattgcaagagtcaccactgctgcttaaaagaggacctcagctgaaaaccaaaaccacccatttcaattcaaaaccttaacaacaccaaaattactttttttatttttatctgtcagaattgaaaacagataacaagtgcaaggttttaaaatgcggtccacgacatcaaagttttttaactatccgcaaaccgcaatgctatagacaatcgcaattgagatcgcataagttgcatttgtccgtaatttgtcacgatatcaacaaatgcgacaaaactataacacgaccttgaccgatatttaaaacctgtttaaaaccttcaacaagtgatttacaacaacttcaggtattctgttcaacccattgatagcaagtgaaactgttttactttcaattatgacattgttaactcgttgactctattcctcaaactctgaacttcaactttacatttcaccgcaaacctctccatgatttccttgaactccttcatttcgatccattttgcgtcgtaaaagcaatctctcttcacgcgcaattcctcaagctcctccacctcgttctgcatcgacctaaatttcagccaaataatcaactaatttcactgaagaagagagaaatttaattcaacttcaacacgcacgcacgtggctatacctatacctcagttctagtgaaagcgattcgtgattggcttcgaggttctcgatttgagacttgagagcaagaagcttgaaattctgcgacgcgattatctgatcgagccacgagcccacgagcacctctgttccgtggctctgatgtatgcgagctttgaagccaaaacgcgggacttgttcccttgcaactctttttctgcctgcaaagtggtgacagagagaaaattagggttcggaatacggatcttgatcttgcatgctcggaatttaatgtcatttggaaaaattgaaatgttgaattgtttggtaggttaattgaatttgaattgaacctgtagaagagagagacgttgaattcgcgtgcggtccatgtggtggagccgttcgtggaatgcggaggaaagcgccattgctgctgcacgcaatgacactgaagctggtgacgaagaaatgaattcaacgaaatcttacttgcttatttagggggaattattattattaatagaggaaaaaggagtaatggcaaatttttttttaaaaattattactcttttcatttattttaatttatcgttttagataacaaaaatatgtttatatgttattttagaactttgaaatgatttttgtcaatcttggtataacattgattataatagtggaagaagtattacatgaacaaaaaagagagagagagaacaaaatacattattattaggctttgtttgaattgattatctgaaatgagatggattaaagtactcaaattagattatattcctttttttttcaaaattgtagatatttaagattagtgtatacccatgaacttttaataagtattaattagtctaaaatatctttatttaatataagctataaaatgtgatttgttgttaattaaagtatttttaaataggttacaagtatatgaaggttaaaaatataattatttcaaataagaatatatgtgcaaacaattattattaatacttaagacaaaacatcaatatttttttaacaaaattattgatttttatgttaaaaaaatataaccaactaagaattaaaataacnggctacaagtatatgaaggttaaatataattatttcaaataagaatatatgtgaaaaaattattattaatacttaagacaaaacatcaatattttttaaataaaaaaataaaaatcaataattttggaattgatggagaaatataattaatttatctttttttatttataaaaactaaaaataaatattaaaaatttataataactcctatattttatataacgaactaagatatatctacgttagaattaagttgtctaacaagcactttataactcttgctattcatgcagctgattccaccaactctaggtgtaggtattctatttttaaaaaaggtgtacttatgttaaaaagtttaatttaatgtgtattacttatccacgtaatggggtaaaataatcatacaaaattattctttttggtcttgtttataaggtccaagtgatatttaatccttttatatgattcaaatacataatttttcttatttttaggctaaaatatttttaattaaaaaagaaattataatgacaaataattacaagtaagaaaaaaataaatattaaatataatgatagtttaaaaaaaaaattattgctattaactaaaatatctaagtaagaaaatgatatttttattatatttcaatattaatatattttgtttcacttcatattattttgctccgcttcattactactagatatccaaataaaatcttagtaacatatataactcaaacttcagattttgttttcaaagaaaattcagacatgtacttagcggtggctaaattactacttgaaattatagtgaaaacaaatttataattaaatgtctttttttttaaaaaaaaaataaacagtaaaagtaaaactacaaaatagcgggttaattcatagtatatatgccaaaaagaaaatccatgacccaaatgatggatctgaaagcataaattaaatgggcattgttgtctgagtgtcgagagttttcaattcgtaaaacctaataaatacatcactgccttcagaaaacgactgcgcctagtttctagcgaccctttaatcttcgtcagcgttacttttccacctcgtacggtaacacacgcttcttctttttcttcttcttcttcttcaaattggtactaactagtattccgtgtttgcttaattgaacctctgatccatcaatctgaacgatttcatcaaaatcattaccatttgtttctttaatttgaaggaatatattttttctatatattagctgaatgattcagatttcatttttttttttgacaaatatgaaaatggatatatttatttcgatttcgatcagggtttttactttcacgcgaatgagtttttatgaagaaatccagcgttttagattgaatgattaatgattaaagtttagagagtacttttacggatttctatgcatagtaatgaattctaatgcactaaatgaagaaggaagaaattttacttgattcagtgattgatctttgtgggtgattgaatttggctggttactgcagagggattcaattgagagggaaagggagtgatggcagacaacacacagtcttactgggaaggctacaaagcgttttggtcagagaggttttcctttttgggcaactattcgaggttcatcaaccgtgataaacccatcccttcctggtcaagctctgatgtcgaggagttcattgcttctgatcctgttcatggacccgtcgtaataattctctcactttatctacatttatgcctttggtgatgttgtttaagcttattttttgatgttctttgccttgttattttgaatcattacattgtatcctgagctgctacatagtgcatagcctaagctttctatgatatttatttgtattttagtctggggtgttcatttgggtattctttgctattgttattattattgttgtttgcgtgtgtgtgtgtgtgttttctctcaagtgtgcttcgttagttttattttggaactatccgatgctctgcatgtttaaatctggttccttatgttatatttcttgatgttgggttgggtatcgtttgtttcagtaaaatggtaccgaggaggtagttggtatttcctctacggaaatttatttggactatgaggactgttattttacaaactgtttgtgtgattacatcagccaatagactccttctttgctcaccaagtcagaagtagaagacacaagttgtcctttacttgtatatgaaagtccatgagaaggtggtgtagattttgcagtactaggcctttcattgataaagaaaacttgttaaatgtaaaaatgtaaaagcttttaatctatttatctagtataaacatggcataagactttgacaaaaaaattagtgagagttattaaggcacaaaagcattaagtagtttaagatacatgtttgcactttgcacaattagttggaaatttctgcattgttttccattcattattcctggttcattccaaatgttggtgcatttttttagtttgtttacactaagattgcagccacattaagaaatggaaggcgttatttcttgtgcagtgttccacctaatccagatggaatagaccattggactcacctaaaacaaggtgctattgtgccagtaactcaaatgtggaaccatatatctttatattttgcattcctggcttgttatgctgggtttgcctcactgcatgtctgcatacctcttcggttggtcttgcattaatcactctgtaatctctagtacttttatgtggattttaagcatttaaagtgactgatttagacgaataaccttagataacttatttcgtggaatccctcacagtctcggttttaaattgcatctgtagatgttaaaattgtggttgtgatgtggttgcagatgcttcccatacagtaataatgtggctgcaattgctgttgtggagtaattcaaaacccagctcacaatcaatgatagtagcactgactgttaggcattgacagatttaatggttactactgttatactgtattaagctaagttagtgtgtgttgcctgtttggttcggcttacttcgacgaaataatcactttctttggaaactgaaaaaataattttttttcatttccttgaagttattagggtactccatttgtaatatactcaatcttgagttaggcattaaccatgtgttttcaaaagttttgtcctttcaacataatagagttcttctgtcaatcatccttgggactctttttctttgaactatggtgctcatctctttgaactctttccatccttcattggttttgctaatatgcattattttcataatgtcattactcactagacataacatttgtctctatatgagtggttgtgattcttatagtctgaagagataaaagaactgagcatgtttccaacaccactggtgagatgatctccttgaaacaaactaagacaaggtgctattgcatcaatacctgtctattttgcattctcagccatgttatgtcaggttggctctgctgccgctgcataattcacttttcaatcttcagtagttttttgcacaactatctaatcgcttaaagtcaccagcttagacaaataatctttgatgacttgttaagtgaaatcattcacaatcagtggcagtggcacttttaggcatacacagatttaatagtttctattgtatggagcaaagttaaggaaatcttatttcccttgaagttattaggatgctccattctagtcttttcaatcttgagctgggtattaactatgtctttttcaaaagttttgtcctttcaacataatacagtttgtccatcaagtgaatgccctttcaacattattatggtggtcatcacttttcatcattcatgatttttccaatatgcattgttgtcataatgtcatcactcactagacatgacagcattttatctacaatttggtggttgtgatgtttataatccaaatgattcaaaggtgattaccttgaaacatcccgtgacttcccccagaagaggaaaaatagatattgtatgaaacaaaaatataatggacaaattatatttttctgtttcatatgctattgttcacgttttagctcatcctcttaataatggaaaatgacagaaaatctatgttgccaactacaccctatatcactaactgtttgtggctgttatcattttctgtatttcacctgctggaatattaagtttatattgaagttttccatcaaaataactacgatctgaagtgctgtgtgggtaatttcccttttcccatttcagctgaaaagtgctagagaagcagtgcaatttggcctcacaggaagtgctttgggagcattatttactgcaggctatgcctggaaatactcaaagagtttacatggtaatctaccacttctcatactactgaaatctttttcgacagcactgtgctttttgatagctcttaagttgattatcgtatagtaagctaaaacaggcatcattcttactctttttgactcttgaagatgttttagactctaaattggttttataatattttgtatatagtgttgtcataaaagtagtatgaaaactgattcatatacattcttaatcttttacttttccctaccatattgaacaggcgctggactgtcatttttagctggaggtatatttgggtggacttttgggcatgaaattgcaaatcacacacttcaactttacagggtagacacattggctgctgaggccacgtttctggactggtggaataagaagactggagggtattaaaactgttggcttatgggaattaatgctacatttgttatcgtttctgaaaaatgaagaataatttttggtgttggcagtgcgatttatgctcactgaataagtatgttgttttgaattaggttatgttttaaaactaatgcatcatcgcaaagcaaatggtgacttgtgccattttctctctctgtattgttgtgctgttgttcattagtctggaaccaatggttgagagaggtcataagagctggcattttcatattgttccaccgctaggacaatcgagacaacatacttattctgtttgaatattcataacaaaaaaatgcgagtaatttatttttgactaatcaggacactaataatcatacttagttggagtaaaaactaagtttcacataagatttgtactgtttcctcattggttttttcgttatcttctcatttcctatcacgacttattcagaagtacgtgtttgttaagtgtcactttggattagagttttcatacttaatttggataaatttgattttagtaaaaattaatgagtgaattggtttatgtttggaaataattggagggaagtgattttttgcatggtaaatgtttagatagtgttgatgcaaaatacattgggatgtacaactttagggaagatataataggaatattttatcaaatgaaattgatcttttagtatatacatacaaatgagattttattaaatttaaaatgaacaaaaaatgtggttttcacattaagggaattaaattcaagcatatataatcaagtccagagcaatctatgtacacattcgaagtaaagcacgtcctccaaaagaggtttcccatgacagagtcaccttaaatcggtacctcatttctgttttttctttttatgttcatgggagaggctactgaagtcaaaatatgtactcccatctgctctttgcttatctccaaaatatgaatatatatgcatcaagcgattctatgtgtaagtaatctgtaaggtaattgtttcctcaatgtttttgctgcaattcagattttaattatgaagatcttggaggtcagtgctaaagttttggcattctcttcaagcttcatttctctttaaatcttcaggaggtcattatgggattgtaatttgtttcaaaagttattcgataagttattagactagtgtttcttttgactattttaattgccatttcgacaggtagaattgcacagtgattaaccagagccagcgaacatttttttttttaatataggagaaacaattgacattgtgctcttctaatatagatggttgtagtgctcctcagctatttgtcactattgttttaagcattattgagcatattgtgagtgattgcgagattttcattttcatgtattttcttcggtggctattgcttcatcaccaaccaaaaagaggagacaatcagccgctacgtgattttcttatagtagtattttgatgtattattatggttctagggaatatgaacaatagtatagcatataaaaagtatgattatgatgaaggaacaaaagaagtggagtagctatagagctctacatatcatgtaggaaaagtaagccgttacttggggttgtcttgttccaaactacattcgaggctgttggtgtttgtctaaggtttcagatgataatggttaaggcaaatttgacacgtggagaccccctagtgagccacctaagagaaacgtatcgaaatattgaaaacatgtttgcattccaagataagaaaaagaaagaaaaatgcctgacaacttatgcagcagttgaatcatactagttttaaaggtaattctatacgcaaccttttaattatcatggcatttgttttcgccattgccccctaaaattcagcagggccatgtagaagttcgtgcagagagatagattctgacttaatgctcttactacaattcaagagagacaacacaaacaataagaaattgacaattttacttaggacacaacattataactgaacatagtaaatgacataaaagaatgtgcaatgacatcataggatacaaggacaacaatttttccaattctatcttagtcaagcacttgctgagattattatgggataggaccacccctacttggaatgtgtcacgttaaacttgtaatcaaagttttaaaaaggccaaaacgttgtcatattaacagctgtatgcaggaagcaattttaaatcagaatgttcagttcctcaagatgatgacaatgcaaaaacacttagtgggatttgtttgcaaattgcccttgtattatattatgccccctaaagaaaaagaattgtttttttttttctttctttttttttcagggtgggtcagcttaagaatttgaggagcacatgtgcacaaccacaaccaccttcattgatgtcaaagagctagaccaatccccatcatcttctgataaggctgaaatttgattgtccccttcaaaatagaaataaaatagatttttttttttttgacaaaggcacctttgcaaaagtggtcggcaatgaccctgtgctgacggttatttggccagggaataaagcagaaccgtcctattgtacgcttgaggataatagaagaggcaaacaaagccttaattttgatcactttaattagattttcattaatatcatatttttttgaactttgtactatgataaaatacacaagttgatacccaaagtggtttgacccagtggaagcgtgttgggtccacaaggcttgagaatgtgtccaggaatactccacaaggaagtctctagcttgaatcctgcaaaaaaaatccccttcaatagggagaaattcatatggctccatccttcaggactgtgaagtttccctccacagttttaaagttattgtaaaaaaaaaataaaaaaatacacaagttgataaaaggggcaaatgacagatcaaagaatggtaatactaataccagaatttacttttatatttatttatatacaaagagaacagttgtggattccacgtcccataataaggggcttttcttagcatccaataaggtgaggcataaggaagacaagcctagccttaaaaccttttcctcaatcagaaacatatatttttctcttctgataaatgaaatcaattctacaaaaatcagcaatatacaaacatatttcctatttgacaattcagctaataaaagaatgaggtggctttttggatcttatcttcctaaaataagctcaatctaacgtcattgccacatggttgatgctggaatgtgactaatggtggggtaagtgaatgaaagtgcagccactctgtgaaagttgatcttccaaatgaattgaattgaattgccttgcctcttcgccgtattgcagattttgtttgttgcccccatcatttagaatgtgtgttggtcctgatttctgcaaaataggtacctttaatatagatcatactagagatactccatgttgcaacttgaaggatgtattatcccaacttttcgttattttgatatatatacacatgattcactccacaagaatataataatattcttctcaaacaaagccacaaagggctgaagtcagcaaacacacaaacatccagaagaagaacaagctttgaaatccatttgatgctgcctgcttcaaagtaaaatttgatttaaaaataagaagaaaaaaaaaaagaaagataaaagaagataattagattgacactgcttagagtccaccaactactaactacctacttaaaaataccaagatagcatacttgaaagtattttgctaaaatatataattatgaatttgactatctgtaaattacattacatacaaatacaaaccccttttaaattgatacacttcttctcccaattgtttaaattaatttttttttctggcatacaagtttatcttttgtgtgaatcaaggtatctctcgactgaaagtcaatgactaatctcctgagatactgagattcatttaagaggttaacctgtctcagcagatgtttttccatatgctcgaggctgggatcaaacccatgatcacatgcttaaaaggacaaggttatctaccacatcatattggttctggcatataagttttgctataagctaaataacttttgtagagttagggtgggaaataaaagactggtttttatttttacctttgttttagtggcagaggaggtaagagaaattgaagtggatgaagtggatgagtctgcaaaagcagccaaccctacattgtaagccatagtttcatcaggttgaaagagaccatagttcctttccgaggttgctccactcttcatgtcctcattgaacaatgcaaaaaagtatgcttccaatctcattctaggactcagaggtgtcccttcattagccatttgccttctcagcaaattcctgttataagtttgagcattctgcactgatgcaccaatctcattagggtctccgtgggatggccaaccagtctcagataccctaacctcaatcccactaaaacccaatttagcaatggcaaatgagactgcatccacctgagcatagagcatgttatcatagtgtaggttggtgtaagggtcaaccattccttcattaggattgaataaaacatagtccaatggaatcctattagggtcatccttgtatgcaaagtaagggtatgcattgatccaaaagggtgccttagtggtggccaagaagttcaaaaactgggacatgatccctgagatctcactcttgaaactaccagctgaaggagggtatgattcctgaagcacttctaaggaactcggcgtcgaaacgtggatgttagagtctaggcctagctgaactagagcattgtggatgttcaccactgctggaacaagatactgaattagagttttgtcaccatttgtgtataactcattccctacttgaattcctgtgatctttgtgtctgggatgtatggtttgatatggccactcacccattgaagggcttgttgtggatcatttaactggcttaacatgttgttttcaaccgtaacaatgacctcaacgtttgagttagcaaaagctgtcaaaatctgagggttggtgtcataaattcttgtttttgtgacctttaagttgctgaagagttcaaggactttgtctggatggggcaaattgttagctacttggccatagttgattccaaatgatgcaacacgtccaaaaaatccaatatctgtggtttgcaaaatcagtgaaaattcgttagtacttaaaaaatttcaagggaaccaaacttgctttttttccatatcaatggtatcaagttagtaaaacaaaaatgttggctcaaacaggattgcctccaggtggaaggtatctgtggtctagaccagaaaaagtaaaacaaaaatgcaacaaaaaaaaaatgcacagtgaacagaaaaaaagaaacaaaacaaaacaagcaagacacctgaagagaaaaacaatgccatgagaatatagctgattgctattcttcggataaatgttgccattgtgactagtgactgagggtgacacaatgagactgaagagtttcaaaattactcaggtatgatatagataatagtcttatagagctatcttcagcaagggaattcctctatttcgttgtttgaaaaattttggaggcagaacacaaggaaaaaaaatgagaggatttatgtaaggttccttagtggtaagggctttttaattggcaacgtttgtccttatatttatattgttttggaaaggttgtctctttccaacccacgccaacttccaaagatgcgcattctctaaatacccttcaaaagcaaagaggaattccacaacttggtaaaatactagaggctagctagccagtcatcgccacaagatcaaaaaaattgaggttaggtgaaatttagttgaccattattgtgattccatatcactaatcatgcttccgtgcatcttcctgaaatacatcaccttaaatttaacgaatgcttatcttgaatcaattagtataaatattaaataggtgtcaatgtgcatgtcaactaattataatcaaatcattaaaaatatacatttacaaaataaattgtgtttagcatctcgccatgatagagtgaaaacctaacattatgttaacccgaaaagaattgaattaagatttcataagaaaaaaaattataaatataatattctgaatttattgtaataaatgtaatttactatgcatataatatttgattcagagaaaattgaatatcttttgtttatgtctaattaattcagtaactcaatataaactctcatccgttctgtatttagacgcacagtttcaaacacaaaattcttatgatttttttctcgtctgatatggcattcagagacttaagtactgtacctacctggtagacttattgtcttagaaacaaatttttctgataaactatgtacatcatcggttcaccactctaaattttgagtttgaattgtatgaatataaaaaataaaaaataaaaaaacataaaaaaggagatctcacttaacatagtccagataagttttctacaaaaaatcggtcattcacaaaatcgtaaatactatgctgctatatgataacaaaaaaacaggtaaacatttactttaatcaaccatcaatgagagaaagactatcaataatattacaaaatcataaatactactgtatccagctatatgataacaaaaaacaggtaaacatttactttaatcaatcattaatgagagcaaaactatcaataatattacgtacacatacataatctcttcacatatcaaagttatattttcaaacactaccaattattttattttttttcaagaacaaacaactaaaattacatatagattattctttgattggagtcaaatatatcttcatttatgtccgtagtatatttttattcgacgacctaaatacactgaagagccgtgtgagacatggtgcttttgtggagtacactggtagggacctcggaactgaccctttttgacttggcaatctttttcttaagaaaatttcagccgtgacgtgtaatgggggcttttcttcgcagcactaactcatatatacgtgtaaaacgtactactatatattatcatcttgcagaaaactcttatatttagttttttcaaattttgacctatattatttttttacgatgtgaaaaattttagtccatcatataaaaattactatcatattatttttaaaaaatgttatatatctattcttacaaaagattattctaacttattttttcaattatatatatatataacaataataataaacgtatccatcattaagtttattagaaacaacttttaggatttctattatttttaggaaaagctagctagcgtcatggatcatgtgcttgaattcgatcagaaatattttttattgaatttattgaatttctttttcacaagaagattgaaatattttttaagcatcataaaaaatactttgcttggccacaattctttgatcacagtacagtactacatgtattaactctttgattcttcgtgatataatataattatcctctttaaaaaaatgctttgcagaatagatgtggatgtcggtgctcttcttgttttgaacattaacaagtaaacaccttttttgatatactatttttgtagacaatctaatttatctcactttggagttttatcttgttggtattaatggatattgggagagtagaaaaagaagagataagaaggaaaacatgtataatgttttcatgataaacttttttttaaaaattagttcacatatatcaatatcataattttagtgtaattacttaggttggtggtgaatttcttttaggatacaataaagactcatgagtataattaatttgtacttccaaaactcaaatcatggtaactataatgtttatataagaataattttgttttatttttcctacaggaaaagtaaaaataaattttataaatatatattgagagaatgaagtaagaattgaattgaagtaatttatttattttattccaaaacaatgaaccatgacaacaaaaccataaaagtcagtcaaaacaaaaacaaaaaaaccataaaatatcaaataatgattttgaaaattaagaagttcggcagtgaagtattttttgttgttgttgtaaggatccggatgacaccaccatttaacaattgagcacacaattgatacaaaagcaagtgatgctactaattactaaatatgtttctccaaaaaaaaattcatctattgaaataaagcaataaggctttggttgttgttattaacctatataagttgtattaagttgatggaaccatttgattatattctagggaataatattcatgggaaattgggaatgttattacttaaatgttattctcatcaaagttgtttgtaaaattcaattcctacccttagaaatgtctttaaatttattttaatttaaaatttaaaatattaaataaatgagataaaataagagataaatgataaattattttaaacattcacgtgaaaatatataagattctccatatttacatgaaaataagatgatgtaagaacatgtaatatgaatttgtgaaaataaatcatgtttatgaatatttttaataaatataagaatatatatttttatttttacattgttgagaatcagtaagattctttaaaataaacattccctggtattagaattcttgcatatcataacaaaacatgcatgaagagacaacaaaaaatacattattcttcaagctattattgaacaaaacatataaatgaaaatgtaataattagctactttttaacgaagcttatgttaaattctctttaccattctcgagttccgtttgaaagtgttgaaatgtgcactaatgtcaaaacacatgcttatttcttttggtcaaatgccttgtcattttgagcaaaggcctaaacaaataagtcacgcaatcagaaatcaacactagctttgtaattttcacctttttttttttctttcctccaattcttcccctcctgacgtggttttaaaatttcaagaataaatttattttcaattaaattaatgcaacgtgcatataaccacatttgttaaggagtaagaaaacaatatcttagaaataataataataataatataaaaacagaattcaatcatccccgacattgtgcccagcaataggggatacgattagattccaagtctagggtatcagaatattcgtacgtgcatcgttttgttgtcgtttttactttaatgattcatcaatcaaccagacacaacaggattgcaaaattgggggatacatcaatagttgagtacttgagttagatggcaaatgaaaaaaagttaaaaccctcaaagaggaaaatcttcttcaacaagtaataatacataacaaaatgttacagaatatgggcgctttagaagaatccgaacgataattttatttggttagatgtattatggaaggaaggattattgaagagaaatatgtgtttggatcaacattaataaaattaattttaaaaaaatgtgatttatgtgtttgaaagttattgttataaaaacatgttattaataatacttaatataaaatatttgtccaatataaaaattatctaaaattactttaatttagaatcaattttagactaaaaattaatttaaacattaaactaaacatgcacgaataatatttactaaaaactgtttaccggtgagtggtttgttttgtttatttttaaagaccaagtactcctttatttttcatacttcttannnnnnnnnnnnnnnnnnnnnnnnnnnnnnnnnnnnnnnnnnnnnnnnnnnnnnnnnnnnnnnnnnnnnnnnnnnnnnnnnnnnnnnnnnnnnnnnnnnnnnnnnnnnnnnnnnnnnnnnnnnnnnnnnnnnnnnnnnnnnnnnnnnnnnnnnnnnnnnnnnnnnnnnnnnnnnnnnnnnnnnnnnnnnnnnnnnnnnnnnnnnnnnnnnnnnnnnnnnnnnnnnnnnnnnnnnnnnnnnnnnnnnnnnnnnnnnnnnnnnnngtaatttttttaaatttttttattttataatataaacttaaaaatagaaagaaaaaaaaaagaagcaaaaagctagtgagaagtcggattcctactttccaacttctcaagcatcacaaaagttgtgtacataagaaaataaaatggaaagtaatgtagattggacatttttacatacaaagtagtgtatataggaaaaaaaacccgaagaaacacacaaggttggtgtatttgtaaattgccatcataatgatagctacttttttcagaaagaaaaagggtggcannnnnnnnnnaaacaaaggtaaaaaaaaatacaaatacaacaaataaaataaataaataaataaaacaattatctatacaagtcatgcaaatttttggataaacattttagtcaatcatgtatttcatatatttaagtttgtgaaccatcaaggacataaattaatcgacgtgagatttttcctatttaactaaaggtcttagatccgagtcctgtgtattaagttgtgttaaatacttggagaaaaaactttgctagtcataatatttttatctaatttgaacatgattatctttagtgaaaaatacatgtggtctcaaggaaaaaaaaaatccaagtttgtgaaattagccaattttattttgcaagtacaacctttttgtaacttattttttatccataaaaattgaacttagatactaaaaaatttataacaactcatacatactattcaactaattaaacggatgataatttgtaagttgtactaaaataactattcacaatatatacactaaaaaaatcataatggaagactgtttctcacattcactattccaaaccacctccgtaatctccacatccataaaaagaataattaagctttactatcttcggaagcaatcattttaaaaaccaaaccctaaaaaaaaatcgtgttcattgtctttctataagtgttccataaaatgatatgctaccctattttttagttgctccacccctgcatcctagcaccttgaatatccaagcttaatatttgattcgcctgcctcctattctgaatatatcgatgaaagaacttaaaatttgcatccctctttttcaaccaaagttgtctagaccttttgtcaaataaagttgtactcatacttgataaacggaaaaattgtgctaagcaatcctttcttgagatcacttcctaagaacttaacatcacccctcacatttcaaatctcattgcataagcctttttctttggcgagattgtttctttcctcaagattccccacatgtaccttacttcagcctgagtctctgcttaatcagcttgagtttttcattcaaaacaaatgcttattttttgggactatatatggtataaaataaatttttagcttatttttttaaggactatatttttctaatttattttcttagagaaggaagaaacacggtttttttccccatatacactattatgtaaaaatgcccaatccaatctacactactttccattttatttccctatgtactctatttttgtgatgatgcgagaagttgggtagtgggaacccgatttcttactagttttttcttttttttttctttcttttttttaagtttatattataaaataaaaaatattaaaaaaatactcgttgcttgtgggaagtcaggaattgacaatccaatttctgtacagttttatttttaaaaaaattattttttaaagagaatattttaattttttttgaaaaaattaaaaatatattttattagtttattaaatttaataaatatttatgttaaaataaatataaaagacaacgtgattaaataataagttgattaaaaaataaagtggatatataattattatacgatgaaattaaaatattaaaacaaaaaaaatattaacaattaataaatggaacatgcaaaatattcataaaaattaatcgaatatgaaataatacaattgaaaaacgatgaaggcgtattaaaggtgttagcataatccaattactggaagcatttctgtccaatagaaactttagctatttttaataaaccaataatccaactactagaagaaaacatgtccgctgtgcaacatctttcaaattatgattagtttcctcatttttcatgtttcaattgttattgttagtacgttttattatttttgttttttaatgtttttttgttgtgtttgtctctctaattattattgtttgtaagttctgttactttattagattttcatgattatgtttatctatgtaattgttaatattttttgttgttttaatgttttaatttcatcgtataataattatatatccactttattttttaatcaacttattttttaatcacgttgtcttttatatttattttaacataaatatttattaaatttaataaactaataaatattaaaccaataaaatatatttttaatttttttaaaaaaattaaaaatattcttttaaaaaaatataatttttaaaataataaaattgtacggaagttgtgttgtcaattcttgactttccacaggcaactagtaatttttttaaatttttttattttataatataannnnnnnnnntatatatatatatattagtattacataattagcataagcaatctaacacttgataattttttttatctattaataaataatgatttttttaactgtacagaattatgcgtcagaactgaaaagaaatttatatactgtttatttatttatttatttttaatttctcacatatatcttgcttcatatataatttatttaaaatgcaattcaacattaaatgtgagtatttcttataataagaatttaaatcttaatttatcatactgtgagactaacctcttttactaaatctaacctcattgatattcttttagtgcataatggggacacgcgctgaagttataatttatgacatcgtatatactatcaaaatattccacctctaaaattaaatgttattggtatatatactgctaatttataaaatacnnnnnnnnnnttatgaaaaatcctcaaaccatccttatcatttaaaattttaatatatataccgtcaaatgagtgaattaattgacacaaacttattagcttaaataataattttgaatttatgttttaagtataactgaattaaatatttagataaaaaaatttttatcatttataatgattcgacatgtaatctaaaaaaaaaaaagaatgacacaaataaaagtagaccatttttggaaagaaaacctaaagaactaattaactaagaatagtttcgcacttcaacccggccacatcaacattttagtttggcatatatttttttctttttcaaaatatataaagtgaaaggtctagaacgtactgctgaaataatatttggagcgtaataattaataatatcagcgacctatttaaaacgagttattagtaagttttcaatacacccataacagtcaagtcaggcaaacaaagttgcatctctagactttgtcgggcatgccattttaggttagaaaaagaataatcctgtttaattaacttaaagctgaaaataaaaaggattatttatttctggtctcacatcattctttaccctcattttgcaggaattaattaagagggggacttttccatttttcttttcaggaaaaatagaaacttttctatttttctcatttaattattttacctacatgttcattttattaatcaatgaaggctactaaaataatttcatatttactgaatttgatatttgattactcatatatatttccttctattctgttatattatggagtatcaaataaggtgagcttaacttccctattttttatattactatttgacattaacttatttaatgaaaattaatttgtcagtataaacattgtgagtttatattaacaatataatatactgtcaaacaatataatatattatcactactacatattactaatattagatatatattatcaattcattaacatgagttcagtccatacctccggatactggttcacacaaaaagaaaatgatataatgcgttatgttgttagtgtaaacctttaaaatctatgctaacagtttaattttcattagacaaaagctatgatattgaagacaatattttgtccgttggtaaacaacaaattctttttgtagtgtatctttcatgtacatagactgaattgaaattgtttttaaataatatatatattggagatttcatgccaatcaacgatgaagtcaaaataacatatataaatattaaaaaacttttattatatgaatagattttttagaattgagtcataccatattttacattttaaagaatatatatcttcacacaaaaacctgatcagctagctgaaaagcatggaattaggattagaagtgtctacctgtgtctgagttggaagggatattttctggttgacatgtcttgttaagtttagattttaatcaacacaaaagtagtgcgatacgtacgtgtcattactaagaatttcttgtgtggttggctgcttgcagtgccataacttttctgggttcatccacacttgtctgtatcttaattaagtgcttaatttcgggtcagagccagggagcttcctgcttcaggttttctttgaatgagtcatgtttctttggtatgctttggctagtagtattgattttctcttcaacgagaataataatattattgttcgagtaggacgacgtaaatcaccctaacaaaaagctacaatggtctccaatattgcggttgtggatatggttgatttttcaaagttcaaacggatgtcgatttcatgaaaatgaaagaattaataaagtaaaccaaaagacagatatttttttattggtgaattaaccaaaagatagaaagtgaaactcacagtactttaaagacaattttttttttcgctgtgtacaacagatgtagaatattatggtgcatgtacacaattctgagttttatctaacgagaacgaattgccgtacaaaaaaaaaatctaacgagaacgaatttgagttacctaaatggctaaatgaatatttaatcatttgagtactcgtgtagaactcattcctattgcactatttctttgtacgtatttagaatgaaaagaaaattcttatttttatgattaatctgaaactatatatacatgtaactagatcacaatatatgttaaccaatgtagcagatgggaatcagataaaaagggagagcaatgggaggagaaaaaagattaattgtggctttttcaatactttttattatgtttaattaattttaatgtatatttttatattgaatgatttcataaaatagaaaggtaaacttattttatctatttccaacttacaacttctaaaatttggaaactgaaactgagtttaatttttaataagtttaaaattgaaaacagaaaatcatcccaaatgatatcatagcttttcagttttcagctttcaattattagttaattttttcaaacataatctgaatgtactaattctaattctaataattttatttaaaaaatttgtaataataataaaaaatacacgcactaattattagttaatatatatattaagtattaactaaggaagaattctcgcacaaataaatataattaaattaccttagtgtttcgtaatttatacggtattaaatttatattttataatttataaaagtacttttatattatttttaattatttagtttaaattttaatacatgtatattagtaaatatgttaataaatatttaaatacatttttagataagaatttcttgactttgataatgtcttgcatccttttttttcttcctttcttttaaaaaaaaaatctatttttttttttttnnnnngtctagtgatttcgctgataattaatttttgttaaaagggacatatgtatgtggggcgacatattcttttataatagatttttaaattaattaattaattaaatatgttaaagttatcatgtatgaaaatattataaacaataagatcaatttatcaatttattggaaagtcataaaatttaccaaaattatatgtatatattatagatatggtgtagtttaatttattttttatttgatttaaatattaataacatagttatgaaaatcagtccgttcattgactcgatcgaggtagtggatcaatgggtcagtagtccaaccggtgggccagtaattggtctggtttgacccggtttatattaaaaaaattcaaaattatattatatatatatatatatacacgtatataactaacattatttcattaagaaaaattcacccataatttcatactcaaaaatataaaataacaattgaagtattaaagttgataacacaaataaagtgtatcaataataaaagagagtataaatagcaactgcctaaattaaaaaataaaatgagtcagaattcagaagcccatttcgaaattaaaaaaaaaaagcaaaatagaaactgtaaaaagaaaaaagggggtgtagaaagtaatatatggcctgaaggcccaactagcaaaatacctaattccccatatatatatatatatgtgtgtgtgtgtgtgtgtgtgttcttttcttcttcctaactgtcgtgtgttgtgccgcagctcccgtgtgcgcccctgcaccttcctccctcttcttcctttgctacaccttcctccctcttcttcctctgctgcaccttccttccttctttcctgctgcaaggcgctactgcgtgaaggaggctcgacgatgacgcgacgacaagcttctgcatcaaacctcaatgacagtgcagcgacaacacggctatgagcttctgcatcatggcgtgacaacgacaatggtgcggcgatgttgttttagtgttttttcttcacacacaacccgatccaggttccaataattggccggattctcgggttcagacaaaaacgaccgggtttcaccgagaaaaatcgggccaagtgcatggtcggttcaatgctcaacccaatctagatacagctacggttcgcggttcaaccgattcgaccgatcgggccgaaccggatttaataacactgattaataatataactaataatttgtaaattgattaaaatcaatgttaatttaatttttaaataataatatattaattaaaataattaaattaaagttgttaaaaatttaaaatataccttcagaacaaaaatgtatcaaattaaaaaatttctatacaggaataattatatataaaaattttaaactataaatttttttatacaagaataattatataaatgtgttagaaaaatgtatcaaataataatgtaaaattttattacattaaatactaatagagtaattatattgaatattgataaataataaaatgcatacaagaactcgtaaattgttacagaaataactcaaaaaaatgtataatccgtaagttaattatacatgtaaattatataaaatcatgataactaataaaaattaccataattataatccattaaataaattgaatatcatataatattaaattttacaaatcaatttaaaatgtaataattcaattcagtcttgaattattttttagtaattaatttttttattctcatacatcatataaattataattatttccaaataaaaaaaatgtttctatcatgatcaaataataaaataagaatcataaaaatgaattgattaaattgaataatactatttaatattttggagagaatgaatatgaggttgtcatgtgacataatccaataaaatcaaaccttcatttttattaataataaaaaattatcataattataatacattaaataaattaaatatcatataatattaaattttctagatcaatttaaaatataattaatcgattcagccttgaattactttttagatattaattttttattctcattcatcatttaaattataattattttcaagagaactgctatttagtaagagtacttgcacgaatcatatgaaagtagtgcagattttttttttaagagaggagccggtaatcacttatattggacaaaaatcaaaggatagttaaatatatagggcctgtttggatgcactagtgtaaaagatcttatagaaaaagaatttatttaaaaagctcttatctgaaaagttacttttacataagttgatttggtgtttggatgacaacttcttaagtgcttatttaaaataatatgatatttggatgaaattgtaaaaggtcttttacataattaaaattatcaaaaagggtattatatattttgacattatttctagaaattttgataaaaaataattttatttttataaaactaatgtatctcataaaaatataattatacatcttaacataattaattttcacatttcaaatgtaattaatatattattgttttagtaatacaatcacttacattctaatttataatttaattattatctatgtaattataatttataacataaaatataaaatgtcattaacatcgtaataatatcatcaataatgtcatccaatataaaattgttcaaatgtactcataccataaacatacaaccttttgtattcttaaaaaacaaagaaattaaatatatgctggaaacatattttttagagattctctaaatcgttccatttgtaaagtactttgagcatcaggtccttcccatgttgtagtacttggaccaacttcattttcctcatcactgtttgtatattcattatcttcatctagtgagtcaaattctccatcactcttgtcatttctttgaatgaagttatgtaaagccatgcaagcaacaatgatttgatcttgtgtcttcaaagcaaaaggtggcatattactcaatatcttccatctcgttttacacaaactaaatgcacgttcaattgtactttgaagactagaatgataataattaaaaacttcaactctccctctaattctaggcccaattctaaattgcgggagatggtacctagtttttttgtacggccctagaaaacctgtaaaagtagggtaaccagaatcaacaagataatatttacctaaagaataaaacaatagtgcatgttagaacacaaacttataatgatatatatatttgtaatatataaatgttaagtaccttgaggaggatgtggaaaatgcaacgcaggcttacgtatagcctccataaatatcttagtatcatgtgcagaaccttcccaacctgcccaaacaaatgtgaaacacatgctaaagtcacaaataaccatgacattagtggtagtgtagcctttccgaccaatatagactccttgtagatgagagggaacacaaactcgtatatgagtaccatctattgcacctatacaatccctaaaataagggcgatatctggcatctttcataatctcatcaggagtatctctaaatgatggatcaacaggcctaattatgtcctttgcaaacaaacacacagcttctaagacactatggaaatgtctagatattgtttcacctgaatgttgaaatctttcctcacagttacgaacagaacttggttgactcaacaaaacaagccaacttgctcataaattccgacatttcgagttttcttcaagttgtacttggtttccaagatatcacataattcaagaaagacaagtttcttcattctaaacatctgataacaacgtattggatgaccatttagaatttcagatatccaacgatggcctgtcatgcttgaatctctacatggatttttcacaacataattcatgaagtaattggtaacattagctacagcgagcatcaacactttgttcttcgtaatgtgatcatcatcatcagatgaagagtcatttgatgataatgatgagtcatttgatgataatgatgaagacatcctgtaaaaggaaaaaaagtcatacacaactgaaaataaaaatcaagagccaaaccataaccaagatccatagcataaccaaaattaaaaacaaagatccatgacataagcaaggttcataaccaagcaaaactaataagtgtcaatgatatcagatagaaactaaggaacttgtgcttatgtgtcaaacttgatccatccaagttgtagttcaggatcttctaaagcaacaaaggtaatcctgtttgccctttttttcataagtctagtggctttgtaaaatagttcactcccacgctcaagtcctggtagatctttcaactttgttacacatgcagtaatactagtagggtcttgagcagatacactagattcaaatgtttgaataacacgatctaattgtgaggaaagcttggcagcaaccccaattcttttgtcaccctctcttcctctcttcctctgtccactttcctttgccgaagacgttgtttgagtgtcatgtctatctcaggctcattcacttcaatctcagtgttatcatcaacattatcatttgtctcttctgttcttgtgttgaattcttcattttgtcttgaatctttagatggtgcatatgctgcaaaaccagtagcattagtacccttaaagagaaattccatctcaggtaaaaatttgaggccttgctctctaaactttgctacttcaggatcctcctataaaatcaaaaaaaataagagttatcatatatatttggcatgagagcaaagagataaaaatctaaacaaacgataaagttaaaaattgaaaatttccctaactaattcatatgagaagaaaatttagttagtggtaataaagttaaccaccgggtagctagctcgctaaattggtggtaatgtaattctaaaaggcattccctaaaattcaagcactgactatagccacacgagtttataatagtccaactctcttgactatcactataagctaaatatttggttcagcctcgtgtgaagcagggtggagctaaccaaattgccaaagcatgatcatttcactgtttcagaccatgcttatatgagattgagagtctaaaaattcttgttggtttatgacctgtgactctaggctataaaatgtttgctaccagacaacgaaaacattacgagtagcacacttcctaccttccaaataaagctctcaagagtagtaaatataagaagaaaaaaccaactctttttgacaacttaaggctatccccccaaaaaatcgtactcacagccaaaagcaatgtcctataatttggagagattctttcatgaacagggtttatcacgtgacacttgatcaaatattaaaataactaacagctgatatttcaaaactgcataggatctttttcttgtttgctcctgaaatgctatccatagacttcaatgcaccccttcacaatggttctacccttgctgcattaaagctcatcattcttcttcccaatacttatttaagttattattataattttgctgcattaaagctcgactttatgtttggcggtatttattattaaaatgttcatatcataggtgttaagtgttaacaaagctatattatatattggtcacctattcagtcatccactatttttgagaaaatgagggcctttgggaattaggaggtgcaggcccttgaatttctgcaggttaaatagttttctttatgtaacttgaatccagtttctatcagtttggcattgaaaggttcatcttttaaagaatcagttattaacatgttagtacatctaaatcctttgtgtcttctgagtaatcacataattttttaatccaaatccaagagagttacaatgactactattataagaaaaatacacgaaggtgaacagaaataagtacaattcagataacaccaaccaccaataagtaacatttcaagatgggaaatatcacaccaggcaacatttcaagatggagaaatattacacaaatcagcttctatagttgctgccccactttttttttatagccaatacaaatacaaatacctataaaataaggccaactttaattcagtttttatgtcccacaaaatcacactaatcttgcacccaaaatcttcttgctcatcctagactgaagaccaatcgtagtactcttggcacctcattcactagaacccaagaatattgaagtccaatacttctctatttcctctgctgttcttccagcaattaaagaccacctaattgaaaaataacattgttttacaagcttggcctacacattgtttcatgaacaatgatggatttgagtgggaaataaaatctgaaattgtcctggaatgattcagctgctaatgtagcagcattttcacatattgaaattggatgaatccttttcaatttcaatgaaatcaaaagtgaatgacgtatttggattgtttttatatactttttttttattaaaatggattcattttaaaataaattattgacatatatatgtttttgattcagaaaaattgtgaaacagctacttagatctccttgctattctctactttttctaaatacttttgaattgtctccttccttttcaccccctcttccctcaaaaaatctaaaaacacaaaacaccctcctatactctatagatcttcttcctatttctcctctttctaccccctccaacaacacaaccttgaaaagggtcctcaaggaatgttctgataagtactcctatgctagtgaaaatatttttctttgacaaaaatgttcttattgaaagagtaagaatgtaatttttatgaatacttaggccagatatatactgatcagttcatgtttattgcaaaaaaataaaaatatttaaaaaaatattctgatcaattatgtttattgcaaaatagtaaaaagttactaaaacattgcagcgaagcaccaatcaaacaagacctaggctagctcaacatgcaatatgacgaattggtgtggggtgcatgcgtccaacattagacactagtacactacagtagcaagaaatggtcagtgacagtatgatcacacgtttctaaaacatgatcatgatctccatcgatcatatatatatatatatatatatatatatatatatcatctctcaagatattaaaatacctgaatgatcttgattagaatgaagacaaaatgccttgtattttatttggagctgaggcttatacattcagattagagtaccaactaaattaaacaataaacatcataaaaaaaaagaatttcataaagaaataactacatattcaagtcatttttagaatattagttgaatagtacacacctgaattttggcttcccaccattcatcactagcagcaatggttttcttctgtccatcctagccaaggccagtgtccttcccaataagcttagtccataattgtcattccttttttaaagaatcccacctatttctgaactgcttatattcatatgtcaaatttgttgccttattgaacttttctgcaatatttgcccaaccaagcttagtgaagtggttgtgaggtttatttccagcattcacctcttctatgcacactttcagcagaatctcaatatttttatcacaccattctgctttctttcttttcacaggaacttgattgagagacatttcacaagcttaagaaataaaaacaatgataaacattcaagaatatttaggaaacacctcacaatcttcacaagaatatgttcaaagggccaaaattcataataattaataagacaaacaaaagcataaccctaatccataataattcaaaatttaaacgagaaaaaaagaattgatgaagaaattgttaaccggtgatgtgcacaaacaaagaagaagatatgaaaaaggatgatttgaagataagtcaaaaaaacaaaagagggattgagaacagaggagcgaggaagacgcaaaccttttagcgaggaagatgcataccttcgagctaggaagatgcagaggagcaagggagacgcagaggagcgaggaagacgcagaagactgaggaaaacgcagaagagcgaggaagacgaagagaagtgaggaagatgcagagagcaaggaaacgcaaaggagcaagagagagaaattgtgggtcagaaatgtgaagggcatggtttgtgattttgaaattttttggggacatatttgtccaaatatattttgagaaacagctttccgaaaaataaaattcctaaagccgaaaatttgaacttttaaaaaagatctgttggaaacttttacttttataaaagctaaaaaaacttattaaccaaacactcttaaaaaataaaaaaagatcttttactagtagataagatgttaaaagatcttttcaactgcatccaaacaggctcatagaaagatgatcaataaaggacatttgtttcttttcgtgcatttagcttttcgtaaagttaagcattttttctatttctaaatagaaaaaatgtcttagttaccatggtcaattaatgtaataggaattattaaaatgaattaactaaattaaataatgttatttaataattttgaagggaataaatatgtaattgtaatcacccatagaatcaaacattattttttatatataatagatatgagtaggatatttaatttagttttttattatacttttttatattaaaattaaaaaaaaaaaactattttttaacattatatcctattttgttctggtttaaaatacaccaaacatataataaaaacttgttgcatataatgtcacgttttgttataacctatctattgaattgaacgctacctaaatgtgtcacagaatccccaccactcaagcataataacatttgggtacacacacatcaactagttgaacggccatttgattcattcaaaatattttattaccaatttgattgagaccgaatcataatctatcaaatgctctaggccaaaaaaaatctatcaaattctgaggtcaaactagactagtgggatcattcgcttcaatttaattttaataatattagttgcctttgttagtcttagtcacggtgtggaagtattaaattattttttaatttaaaatcaaattgacctacatatggaaattttgattttatattagtacacaaacctattgttaaaacgccctttttgtttcctttaattctattaaaaagcaaggtgaagtctgtgatgatgttaacaattttaaattgatctaacaaattgaaaataaaaataatccaatgtcgcatcataagaaagaaatcatgttaattactaccttaaaagacacctgttaagaagtccaattttttaattattagaaattaggttgagagtgtatttataatttagctcaattaattgaaaaaaaaatatataaaccgttgtgaacctgttaatatctgtatttaatttttacagataaaaaaataacttgacagtgtgttgttcttctactacttataacttttgtaggtaaacattttgttttgagcttgataatgataaataattattttaactaaaagttcattttattacatctctttacatataagggcatagaggattgctaaaaaaagataaggacatgtaacctatttagatacaaaattaaaagtatttttgacagtgttttagagtttcnnnnnnnnnnnnnnnnnnnnnnnnnnnnnnnnnnnnnnnnnnnnnnnnnnnnnnnnnnnnnnnnnnnnnnnnnnnnnnnnnnnnnnnnnnnnnnnnnnnnnnnnnnnnnnnnnnnnnnnnnnnnnnnnnnnnnnnnnnnnnnnnnnnnnnnnnnnnnnnnnnnnnnnnnnnnnnnnnnnnnnnnnnnnnnnnnnnnnnnnnnnnnnnnnnnnnnnnnnnnnnnnnnnnnnnnnnnnnnnnnnnnnnnnnnnnnnnnnnnttttttttttttctggcatttcttatcaaactcttatttttgtaagactaaatacaaaatgctacacacttaaaacacaacttttgagtgtagattcatctaaatccttaatatttggttatacataaaaaaaattaaatataaaccatttgcctctaacattagtcttttaatgaaaagaattcttaattaagtatttgccataagaaaataaaaaatacagcatacatatttaaagaaataaagtgtaacttagggactagcaaagaaagaacacgtctaaaccaaaagtgtaaatgcacatatcatcccgtcttctatgtagaggacactaatacttttgtacagggacaatggtggatttagtaaagaaactaaaagtgccaatgaccattaaaatttaatgcatatttggattttcagtccatattgtgtacgaatttggagatcaaatcaatgatctacaaaactcattttgcaaaagaaagggtgaggatccttttgcaaaactcattttgatgcaaatgtcagtttgtaacaattacccaaacatgcacttaatcttccccttcctctctattcctttggacagctccaaagtgttttactagtatgtctaccacaacaggcaccaagtccttgcaaggcacacccttcttatacacctcagctagatgtgaatcacttccaattctccctccaaggaaaatatccacaccttcagtggccttaccattctcatccctagccatgcaccccatgaaaccaatgtcagcaacttgaacctgtccacaagtgttagggcagccagtccaatgcattctcacaggcctagtcacagccacttgcctctccacttcctcagtcactttcaatgctctttgctttgtctcaattatagcctgtccacaaaattgattgccagtgcatgccaccagagtcttcatcaatagagaaggttcaggtgagaatctctccttcaagagaggttcattgagcaaggcatcaattttgttgttgtccacatttgggattataatgttctgctccactgtgagcctgagctcaccggtggcgtattcgtcggctaaacgcgccaactcatccatgtcatctgcttggactctaccaactggaatgtgaatcccaacatagcttaggccctcttgtttctgtggatgaacacctaagtagtctcttctttcccattgtttcttaaccagttcttccttagatgctctctccagctgcttcccgggcattcttttctccacctctgacctgaatacttctatcccctgcattttgcccaacaaaatacacttagagtgtgtttggatagagaattttaattgggaaaagtaatttattaggggatttaaaattcttcaatttaaaattcactgtttggatatttttatacgaggaatttaattttttggaattttaaaacagaattttaaataactaaaaatgtggaatttgaatttccctctaaaagttgagaaattgaaattttcttcttttttagaagctctaaatgcacaactttttgtttcgtctcaatcaccgacgtactccgaccttcgctactctcacgacaccacccaccttacatgttttttcgtgaatgaggttcaaaattttaaaaatgaaaaaattcaatttctttatccaaacacaaaattttgaaaataaaagaattttaatcgatgcattttaatttccctgaattttaaatttcctgaaattttaaaatactccatccaaacatatatttggataaagaaattttgagtatgtttggatgaagtattttaaaatttcaggaaatttaaaattcagggaaattaaaatgcataaattaaaattcttttattttcaaaattttgtgtttggataaagaaattaaattccttcattttcaaaattttgtatttggataaagaaatttaaatttcttcgtttttaaaattttgaaccccatgcacgaaaaagcgcatgagatggtgccgtgaaagtagcggaggtcggagtactagtccgagattgagacggggcaaaaaatggtgcggttaaagcttctagagaaaagaagagaatttcaatttttcaccttttagaagaaggatattcaaatttcacatttttagttgtttaaaattctattttaaaatttcaaaaatttaaatttttcgtataaaaatattcaaacaatgaattttaaattaaaaaatttcaaatttcttaataaattactttctccaattaaaattctctatccaaatatattcttataataataataatgacagtggaaatggattaggagttttggaccaaacattttaaatattccagtactttgttgtgaaagtgtgtcataattagtgattcatgatcatgaatccagtactactaaattttggacagaggatcagttacataactagaaaactaaacggcctaatacatcttagatacctcagaatctaaacgaggagtcaaaagcctaaactacagtgattacaataaaagaatccagaattctgatccgaaaatattttataaagaggattgatacacatacacttatatataccaaactccttattaatacataatttatctttattttttattattatatcatgttacttataatactcgtacttctgtgtctgtctcacaatagatgtcaaatatgaatggattttttcttttataaattgcagtaatttttgactttttgtttagattgattataatttatgaaagaaaggactatgagtctatgacataactcaatcttaaaataatctaacttattatttacatgtatgatgtgacagcaggcaaaagttgtaaaattaaataaaataatgacttaccaattcgtcaatcaaccacatcattcttgttttctgtctgttccctctgaagccaaggtccctataggcctcaaggacagctttacaaagtgggattacatcgtcggcggagacccatgcatcaagtggaattgcttcagcacatctcttggcactgaagaaaccaccaacaagtaagttgaatccaaaacgaccatccttgtttgcaggcatgtaagccagatcattgatgtgtggatgctcaaacagatcatgggatccaaccacacacacattccacttcctaggcctgcacaaaatcaaaatttgaaatatgtaagaaccccacaccaactcgtgaaattctaatgcacaacaagtcaacagatataatcctccttgtataataagtgtattttttatgcataggaatcaaagataggtaccaaaaagttgttaataactctagcagccaataattataatccaccttatattgtaagtgtattttttatccgtaataataaaaaacatgtaccagaagatttacaataactcatgttgtttaacaaacctactgagttagaccctttctttatatttgtatactattacttacaagtttgacatggcagggttgccacgtgaattggcagtgatgaattgagatagcaagttgttgtatggtcgagtgtcaacaatctcatcagggtcaatgcctgcaagagggttaccaacagggtttctcacattgtccattccactctgaagactagtcaatccaacctcgtcgaggccctttagaatttctggcacatcaggtagcaccacaccacgaatttgccaattctgcctcgttgttacatcagcacacccatcttttccgtatttccttatcacactagccaagtatcgtgtttgggcacttgttgtcactccatttggaagcttcagcctcatcataaatctaccatctgtttttaggcaatgagaagaaattaacccaactatattaatcaaatacaaaacttacgcacaattttttagttgatgttgtaacgttcttgaatcagaattggagtttcatctcaaataatacaaaacttatacaaacctttattatagaattggagtttcatcacaaataatacaaaacttatatacaaacctttattatacaaattattgagataaaactccaactctaattggagatcatcacgaacaataattataaaaactatatctaacttttatcttatattgtcaaattctatgtgtcgtcctttaacatgtgaattacgagatgaaactccatttttaattagaaaatatataaataaaaagacacttacaatagtactacacctaaattttgtgttgcaccaaaattgtgattggtggtggtgatgcaaaccaaaaggaatattcaaaaaagtggaaacttacaatgatgctttctcctatgaaaaaggccaagccacttgagtctaacatcaatatcatccttggtgtgcttggagctctcaatttcctcaagggacatcttagccaattcctcaatcccaccttccatgaaaagcttcatggggtctttctcaagcttcactttctcctgagggctgatgcctcccctgtactcttcctttaaaacccagaacccatctctctcctccactctaggctccaacctcgaagcctccacctcctccgaggaggtggtggttgacggagccaccgttggggtagtggcggcgcagagccatgtcttcggccgagagctggtggggaagtatgatgatgatgatgatggaggaagaggagcaagaaaacgaacagagaatgaagaagacattatcggaagaagaaggaacgtgtacgtgtgttgtggcgcggtttgagagaaaagtgttacatttttgtaggacaagtgaaggaggaccttacatgtaagcaagaggtcagaggcgatcttcctcgaatcgatagacccttgggtgcttccaagggtcacctttcctcgtgaaacaaaaacacttttaactcatatttcctcccaaaattgcatgctacactacacacattctcatttcttatttctcattatacattttacacaaaatattggattttctaaaaaaaaataactaaaataaaaataaataaatactgctcgctctattctaaaataattgtcacatttcaaaaaaaaaaatctcccaaaatatgtatcacaattacctttttaatgtaatattaattattatttttattaacatttctgataagtaatacttttgtttttattataatattaatattgaaattatttttgtagaattattattatttttatctaattattaatttttcttgtcatatgtaaaacaatctaagaagatatttattttaatattttttttagtttgtgatttttttaagatttttttttttagttttggactttttctttattgatcaagtttttttataaataannnnnnnnnnnnnnnnnnnnnnnnnnnnnnnnnnnnnnnnnnnnnnnnnnnnnnnnnnnnnnnnnnnnnnnnnnnnnnnnnnnnnnnnnnnnnnnnnnnnnnnnnnnnnnnnnnnnnnnnnnnnnnnnnnnnnnnnnnnnnnnnnnnnnnnnnnnnnnnnnnnnnnnnnnnnnnnnnnnnnnnnnnnnnnnnnnnnnnnnnnnnnnnnnnnnnnnnnnnnnnnnnnnnnnnnnnnnnnnnnnnnnnnnnnnnnnnnnnnnnnnnnnnnnnnnnnnnnnnnnnnnnnnnnnnnnnnnnnnnnnnnnnnnnnnnnnnnnnnnnnnnnnnnnnnnnnnnnnnnnnnnnnnnnnnnnnnnnnnnnnnnnnnnnnnnnnnnnnnnnnnnnnnnnnnnnnnnnnnnnnnnnnnnnnnnnnnnnnnnnnnnnnnnnnnnnnnnnnnnnnnnnnnnnnnnnnnnnnnnnnnnnnnnnnnnnnnnnnnnnnnnnnnnnnnnnnnnnnnnnnnnnnnnnnnnnnnnnnnnnnnnnnnnnnnnnnnnnnnnnnnnnnnnnnnnnnnnnnnnnnnnnnnnnnnnnnnnnnnnnnnnnnnnnnnnnnnnnnnnnnnnnnnnnnnnnnnnnnnnnnnnnnnnnnnnnnnnnnnnnnnnnnnnnnnnnnnnnnnnnnnnnnnnnnnnnnnnnnnnnnnnnnnnnnnnnnnnnnnnnnnnnnnnnnnnnnnnnnnnnnnnnnnnnnnnnnnnnnnnnnnnnnnnnnnnnnnnnnnnnnnnnnnnnnnnnnnnnnnnnnnnnnnnnnnnnnnnnnnnnnnnnnnnnnnnnnnnnnnnnnngtaataactctatattgtttcaactaacttttttcttcttctagttttactaaacattaacatagtttaaatgtaaatgattaaatagttaatttgtttataaaccttttttttaaaggaattcgattttgagaaacttaaacgaaacctaacattattcttagacacaaccaataagaattttataattaataaagtaaaataaataaaaatcagaatttcaaataaaattaaatttaatattctttatatttttttgtcctaatcttgttcctattttttgctaaattaaagatgcaacttattaacaaaatttcttaaatatcaaaagaaaacctacaaaaatttgttctttataataaattgttaccaacataaaaatataccaaaattattttataaagtatattggtaatatttcgatatctttaattttgtagattttattttgttatttaagaaatttcactcatttcaataataaaaaaaaaatcatataaatactttcggaatatgctctattgaaatgtgttaggccttacccacccaccgcttctcgttttttcattgccttggttttggacttttggggttaattcgttgtattgtgtttgtgtaacgtgtatgcggctgcgtgtaaccgtttgacatgtgatttcaataaataccacagaaagaagacttaaaaatagtttatttagaaagaaaaagaagacaagtcaaatagaacttcccaaaaatcacagttcccaactggggtcagatatctatttaatcatcgttttttttttagtgagatgagtgacttaatcctcttacttattctattcatcatgttttaagaaaacaattgtttattagtagtttttaaataattaaaacttaattattcaattaaaatgcacttaatcataaacacatcactgtaaaatatcataaacatgttacttaaattaagttatatcatatcaacctacagtgatgaaattgataaataattatatcttttaaatatgtaatcacaaatttaatcttataaaagaatatctgataaaaaaagattattttttaaaatatatcttcgtacttcaggtaatcaatctttgatcttcaataaataaattgtgatcagtgttcttatcagttttttgtttatttattgaaaagtgtctttatcagttgcatgaccaattttgtattaaacaggcattagttttaatgacaagtggttttagaatttaactaatagtaattaaatagaactaaacattatatcagtgcgagcatagtatgggggaaagcatgcaacacggaggaagtggacaaacaagacacataaaccttacgagattgccaagagtcaggtctctgtccctaccctagctgaaccaaattgtaaagggcagctgccaatctcttcaatcattacagtgagagaaataaatagttaaaaattaaaatactagaggacttttaattgtttttccccctcttttatgcatgtttgacagaaaagaaaagaaaataatattagaggaaaattctatacatttttgtaaatttatattttatacacttttttttattcaattttttcatctaacgtaggtatttagttttttagaattttattttttaacatatatgatataatgttataatattaaattaattattttattcgaatattttattttataaataatagtattaattattttttgataaaatatttattccttttttataatattgattacaaaaataatgatattgtttttctttttttagactaatattctattttttgtaaatattacttttctttttatagtcatcataatttaaataattatatttgttctattttaaaacaaaatatttcatgttattttatttcctttcttaatatcgttccttttataatgtattattgttattttaaaaattataaatatttacattggttataattgatttgagaaattaaatgttatttatataaccaattgatatgagaaattaaatattatttatacttaatttttttatgagataaacttacacaatataagaattgataatttacttgaattttgagacatattaatgattattatccatttttattactattattcatataatctttttaatgtacttttcttatatattttatcgttgtatttcttattcttagactctaatatattttttatttcaacttcaagtgtgagtctaattttgaatttatgaatttaaacattattatataaattttgaaaaaataaatcaaatattaaatggtatattaataaattgttatcctaaatattaatggactcagttccttttaagtaaggtcttgagttcgaatcttgtagatgataaaaatgtgattaggatgaacgactccactaaaaatgatcaattaacatagttgtgagatttggtccgatcgttaataaaatcgaagtaatgggttagtggttcaactaatggaccaggaattggtccagtttaatccagtatatattaaaaatttaaaattatgtatatattatatgtaagtatataactaacattatttgagtaagaaaaattcattcatattccaaaattcaaaataacaattgataataatacaaaatccatttttttatataaatatccaaaattttatttttttaaaataaaaataaaaataaaatccgctcgggtcggactggtccaaccgagatctagtgacctatccagccgagtttggccaggtcaattgcataaccgatccaatagtaaaatcgacgcagttaagccatcagatcccaattcgaccggtcaagttggaccggattcaatataactgccaattagattatctgacaaattttagtcatcaacaaaatcagtaaatatttcatatcgataacattatataacaaaaaagttaagttatacaagatacttgtcaaaatttattttaatatatttgatatttttagatcaaatacatagttaatataaattttggttataaaagttatatctagtggccctaatttctgtttctgggtnnnnnnnnnnccgaaccaatccgaaccgatctgaacagtttgggttgggtcatttatatatttgggtcaaaatcgaactgaaccgatcaaaaccgttcatgtatgggttgggtcacaggtttagatttacagatccgatgacccgatccgtgaacccgtaataataatataaattttattatttatatatatatatatattaaaaattaaaaaaataatttgacaataaaaaaaaaggtaagatattgtaaatgtttaagattgcattaaaaaataagataggacatttttttatattgcattaaaaaataggatagaatatttttaagattgcattgcataatataatagaatatttttaagattgcattggataatatgatagaatatatttaggattgcattcaaaaattggttaaaatcatatctttaaattagtataaatagaaacatattttggtgttcatgtatgcattccattccaaataatgttagagtattagagagtttatgtttgcatcattgatagaattgttgtgagatcatatagaagcgtttgacaagtttgattctttaactctcaatcaggatttaaaggtacctatttgcttaaggaatataagcgtaaatgtaactattttattgtattcttcttcttgactttgaaaaaggtcgcagctgggaactaggataccagttttgtctctattcttgatgaattgagacatgcaacttctggctgggaaactaggatactagtctgattggaaaacaaaaatatcagtctatctctattcttggtgaatttagactagagctttttgccgggaaacaaggatagcaactgggataattgttgtgtaagggtagactattatagtaaatattgttcacaaatcttttgttttaatttatattataaatttattttataatattatgttgatggtattaaataaatcaattttactactttcatacatttgataatattgtgttaattgtatgagatatttgaaagaatcgtgataaaatagtagttctaaaaaaattaaatgggtaacccggtgatccgaaccgaaccgaactgttcatgaacaggttgggttggattaggtttcaatttttttttctaaaaaccgaatcgaaccgaatcaatcaaatttgatcgggttgggtcctaaatttggccaaaactgatccgaaccgacccgcaaacacccctgtagattgttgtaacatttttatatatacaaataaataaataaacttaataaagtttaataaatctacgagcaacctgatcaatgaatttgcgaaaactaagttagtaaatttactattagtatagagacccaaataataagtaattaaatgtatttaatgatccaatatatgaaataatgatttttaggatnnnnnnnnnnnnnnnnnnnnnnnnnnnnnnnnnnnnnnnnnnnnnnnnnnnnnnnnnnnnnnnnnnnnnnnnnnnnnattttaatttattcttaaaatcaaaactattaaaagaattgttaatacagaaaaagttattactctaatgaaaatattaacttatataaaaaaaatatttttcaaaatgtacagtttgcttatagaatattaacaatacgcattatagttattattgttgaaagagttttagaaatttttttttatcttcttttttggcaaaagacaagaaaagttgaggcaacatgattaaaaaaactcaactaagttaacacctcaacaaccaccgtcaaaaactaccaaccttgaaatatattaataaaagataaataaaacaaaacaaaacatagggaacatagaccatatccattgaaacaatagaacgaatctaaatctaaaatttggaagagttttgtctatctttcacaaaagaatactatatgaagagtctgcttcctataacagcgttttttctaatacattcaatatatttttttttatttttaactttatcgtcatacagattggcaatccatatgacttatacggattgtcaatccatatgacttatacggattggcaatccatatgactcatacggatcagcgattcgtaagaaatcaaatggtatatgttggtatgcaacttacggattttgagaaggacaaaatcagtattatactgtgcgtgttgggtgtattagaaaaatgattggtgtaaaaagttaaactcctatatgaaacggggactattgtcccaaaaaaaaaataccactaatagagatatcatgagaggttaaagtgtttggacaagtgtttccatgacccaccaaaaaatccattatttcagaaataagaatgtaatttttttcatctatttctaattgcccaaggcaattagggtgttcgcgggtcggttcggatcagttttggccaaatttaggacccaacccaatcaaatttgatcggttcggttcggttttcagaagagaaaaaattgaaacccaacccaacccgttcatgaacagttcggatcaccgggttacccatttaatttttttttagaactactattttatcacgattctttcaaatatctcatacaattaacacaatattatcaaatgtatgaaagtagtaaaattgattcatttaataccatcaacataatattataaaatagacttataatataaattaaaacaaaatatttgtgaacaatatttactataataatctacccttacacaacaattatcccagttgctatccttgtttcccagcaaaaagctctagtctaaattcaccaagaatagagataaactgatatccttgtttcccaatcagactgatatcctagtttcccagccagaagttgcatgtctcaattcatcaagaatagagacaacactagtatcctagttcccagctgtgacctttttcaaagtcaagaagaagaatacaataaaatagttacatttacgcttatattccttaagcaaataggtacatttaaatcctgattgagagttgaagaatcaaacttgtcaaacacttctatatgatctcacaacaattctctcaatgatacaaacataaactctctaatactctaatattatttggaatggaatgcatacatgaacaccaaaatatgtttctatttatactaatttaaagatatgattttaaccaatttttgaatgcaatcctaaatatattctatcatattatccaatgcaatcttaaagatattctattatattatgctatgcaatcttctatcctattttttaatgcaatataaaaaaatattctatcttattttttaatgcaatcttaaacatttacaatatcttaccttttttttattgtcaaattattttttaatttttaatatatatatatataaataataaaatttatattattattacgggttcacggatcggatcatcggatcaatggatctgtaaatctaaatccatgacccaatccatacatgaacgattttgatcggttcggttcgattttgacccaaatatataaatgacctaacccaaactgttcagatcggttcgagttcacgagtgacccgtatccatgaacacccctacaagacaccatatgatcatttaggagatcctccgagactaatttagagtcacactcaatccacaactctatccatcccttttgatgagctatttcgattgttgtcatgaccaccataatttctgcaaagaaagatttttggaagcaaatgaaaacagagaagcaacccaagaaaccggagcatttcttggatgacagttaacatcaaaaaggatcaactcgtccaccaatgagaacatggtgccagaagagtcccctgagaacatgcttggcatttaaatcttattttaaatcaacatcgttacatacaagataaattaagtgaatagccatgttatttatttaattaataaaatattagaattttttaattataaaatgttgataaatatttcacaattcaaccaaccaaaaaatatgaagattaataattattaaatttctctgatagttttaaccaagagtgcaaatttaaatttctaggtagggcccaaaaacatcttaaaagaaggcaaaatgtattcttgagtaaaacatctggtgcttccatttaaattttcagtttttgcacccagtatacaagaactgtcatgctgtccaattgtccagcatgtggcttttctaaatgaacagataaaaacactataactaaaactaagtattaaatatggaacttcaattgtacaaaaaagtaagatatcttctgaatataaatcatcaatgagttggccaagatgctaggcattaataaagacatgccagtttcattggcacactcattcccctaaaactctaccgctcagttaagtgaagaagctattcatgtagaccagagaggccattagcacatgctacacaaaaatggcttcaaactttgcacaaggatggctttccaagtgactcctgaaatccgcatcacctttgaagctgaagttataaagtgcttgtcgttgtgtcaagccaactgggtatattttgtagagtttcaaatcattgccccctctaagaacttcaggtctttctgtcttccatataggtacatgattcagggatgtgaactttgaaacaactgcagacttcaaggcctctagagttaaattactagacctggcattaaaataatgagttgtcattatgttatttcatgacagttaaaatgggaagagccataatggatatagtcttgttaataaatttctccaaaagtacttacttataggagaagaaaaaaagaagtataatgaatggggtgtctcctatacgttaaaatccattcatcacctcagcttttggaaacattagatgggagaagttctataaaagttaaactccatagttcattttaatttataggagaaattcaatttattctaactttcctattttcttctcgtataagtcttttgagttggtctaattctgatcaaacacaaccataaagtttgatgggaaagaattatcatacaagaagatgaaaacttatatataggattatagcctaaagaaaaagttactaatcaaagtaaatagtatacctcaagtaaatggattccatctcaaaccttcccctttctctcacataaatatgatacacagtttttggccctctagtacacttgcaagggcgtttgttaaagcctggactattttcttccttctctctactcactgtggccaagtgaatgcaaaggcggcaggaagaatgtacagctgccatatccacaagggccttgaaggaatcagatgggccctcatacttccacctatattaataagataactcaggatgcaccccattgatcataaaataaagaagaaacacaataccaaatccattcacattttaaaaccagataaactcaagatgcctcatttagaaacagaaaacatcaaaatcaaactaccaagattttatttgtcttcatcatttcatttacctcaacgattgattatatgcttcagaattttctgctaggtatctcatggactttgcaacagactcaacatcctctatctctttaatatgtaaaattgaaccaggagaaggagcaaaatcctgaatatttggagcaccaacaaccacagggatagttcctacaataaaagagattaatcactagaagcagcattacaagtgggttcttctgatatttcaagtgtgaaaaatttaagaatccagaacccattataaaaaatttccataagtttatttatatggaaatgcatttttctctttgacagttgaggtatcccagaatacaagaatatgacttgaattatcaatggcggaaggctgaaattccgccatataaacacaccattgcgcctcacggcgggtcttccttcaaaaattgcctacggcggttggcaaaaaaacccaccacaccattccaccatggctgctgtttaacaacactggacttgattcaacattattaatatattatcacatgttagagaaaaatttgtctttcaggaattattgtaactatccacgtcattcgcaatataatttcttgaatttatgcaaacagtgccccattaccaaatgtaccttgcacactattttaagtttggtttatcgtttcgaagctcattcacaaatgcatagtatattgcaattagtttgaaggaatgaactcaagacactgagagtagatcatattcaagtgtgtaaaactcaaaagtattttgtaacaattcattataactaaaattatctactctatcctagaactataaaaaaggactagtttatcaataaatttaagaatttctttatttgaacgtcaaaacattgacaccatgaattcaagaaatattttcctaaatttaattgtgaagaacttatcatcattaatattgatcgagttattccaaattgagcattcaaatccaactaaattttggcaattgcctttctgcaacagaaaatcttggcaatttatggaattagatgtaaaagaaatcagatgggatgcaagagccaaactaaagtgttcctgaagcccatgaaaatctagtgttacattaataatgttgtatatagagtaaatgcaagtaagagaatggagataaaatatatatccataccagcaacaagggattggaagaatttttcagttacataatcttcctcattagaattttcaaatgctaagctaaatttgtagtgcttcaaggcttccactttgtccactgcaatagaataaaataataatcacaattttactcattagaaaataacaacagtatcacattatcattggaactttggaagtcattgacataagcagaggaataatttccaaaaacctaaaaatcaattaatcatacattacacaaaacaattataattgagactcctaatgttgagttgtgaacatagctagtttttgtttatgtccaatgccataatcaagcttcaaggataattgtgtgttttcctttcctgctaatgtgctgcaaactaaaaaccacttccttcaaaatgcatttcaaacgaataagttcaagaaagagttaggacacatacaagttccaaactcctccattctttctaaaaaagttttttttttccttttattaagaaaattgctcttccgtgtcatcaagaagactggagtgaacaaaagggaaaaaggagagaatgggaagtagaaaatagaagagaacaaactgataatattactcaccttgaactgaattcaagtttagaacaagagccttttaaaggactctaagtgaaaaaaactaaatgccaaaaataattctaaagaaaatatcaaaaaataatccttaataaatttcacaaaatctaccttaatagtaaattcctaaaagtatgttcctgtctttatgcctaacataacacttccattcctctttgggatatttctatatcacagtgccagaatatacttaactaagtcaaattatgagatgaattgacagaaaatttcaaagtaaataacggaagatttaatttaattaaaatttcagaacctagatttggacgctagcttgacagcttaacattaagtttgcatgtttttctatgtttttaaaaaaggcattagagcctttcacctagtgatcaatatggcaaggtatgggactttttatatgtagtaggtatcctgcgcattgcacaggtatttcaagcttaggtaaaatttaaaaaaaatatatatatatacatatatatttgaaataataaaaatttaaaattataagggattcttgcataattaattcaggtagaatctaaatatattggagggggaaaattatatttataaagaagttaataatgatgagtctagactaaagttattctcaagatacttctatactctaatttcatacataagactggagcagttgattcaaaacagaaaaacttaagtgcagtgtctaaggtccttttgatgttattctctaattaaaattagacttttacctcagtaaccagtgttgtcctttattgtcaacctttatgttatgggttaccgaggtaaaactccaattttgattagagaacaacattcaaaacaactgaggtcctgtacttgagttttgtccctttttaaaaaacataagaaaaaggtgctaaacagaaagaagccatatctatcttgaggtgaaagagagtacagtaggagaatatatagtgatagatgacagtatttcagcacaaggtcgttggtcaatttgtgctcagtccatgctatcaggtccaatgaaaattagagaagtatttgacataaagaaaagctatccctagaaactcggaagcctttgcaggcacattagaaccatgttacaatctttcagtgtctaaaatttacaatttaattacttccttccctctttttccaaaaaaaataaacaagcattaatatatgaagtgtaattgtttatagtgaatagagtcaccatctaaaagtagaacaaatgtgatttaaatcagagaaacacttaacaaggtcaagcacagaggggaatactgcaactgcaattccgacaagaaaacatctataataatatcaacagggataaaagattcctaacagatattatagttagatagatttataaaaattattataatgtacctcttccatcacggttcctatgacaaccaccataagagtcaatcttgatgtttgatttttcaagggcttcaagagtctgcaaccgcatatttcgagcaccacaattggaaatgaatgcagctgcaagagcagcttcagtttttggctgcactggtgccatgatgtcatactcagcccatgaaaaatatccaacaggaacatcagatgaaagactggttgtcattacaatgttatatcccctcctagtacacaaagacattgtaatattagtttaatcattgtctcattgacacttgaattttttttggaatggatcactctctcttcacttgaacagagaacaaaaagaaagaagaatttcaatgaacaaaaggaaagacagtagctagcattgcactgattatcacttgcaaggaaaagtagacatagacacatgctccctctagtctcaaatataaaaagaagaaaaaaacctttttcttggtctcaaatataagaaaatttcaactaactttatcttatttaatgctaatatctctaaaatatccttcatttaattgaggttctagtttcaatgactctttcttatcatccttgataccaagtttcaatgaagggtacgttgggaaaaaaattactttttaattgaaattgatgcaattaaatgtggttaaccaacttttttagttagtgtgccatgtttttttaccttatatttgagaccagagggagtagttgcaaatgctttaaaaagaagacaaaacaaaacacatagcttcaaattaaaaccccataccaaattagcataaagactataggttatgttggcatacataatatccacaatcccatgacactgaacagagaaaaaatttattctctgactcacatatttccatggaactaaaaaaaaaaagaaccatgttatctgactaagcaacatacaggcagaaaatggtccgatctaatgaataacactttacaacagtgcttacccaccgtcttgccatggcaagattgttctcagcatagtattgtgctgattccatcgatcgcagaacactagctgttccacctggttgaggtaatccaaatgcagcatcaggtttcttatccccactaaacccaaatttacatcccaccgaacacgatttccactcctgcatttgaatgaacgaaaaactttagatggacaagaagaattacagggactttgtaaattgtaattataaggaaaactataaggaggtttatgaattacttcttggcctatcagcatcaaagcaaagtgcccacaaagggatttggattgaataacaagataaggtgttgttaaagaaagaaagaccaaactttaccaaacaaagatcaaccatgatcagttgtaggaccctgatattcaacaactaacaggagaggaaacaaatccattcccaccccccaccccctaaagataaaaataacaataacaaagggggtgtttgtttcacggtataattttgcatttccaggaatcacattcccatgattattataccaagaaataaaatatactagggaatatattgtcataactttctaacatagaaatattcattcccaccctcatattcttgggaataaacgaagatgaagtgaaacaaatgccccccaaagttattcttcaacaccctttggaacaaagtgaccaagctagacgacataccgccaccaccatcacaacaaaaaaacaacaacaaaaaagccttttcctactaggttgtgaggtaagctaaacggtcacaagacaccattcaacttggttaaagaccagattttcaggtatattaattaataattaccatgcaatccctcttaacaacactggagactagacgttggtcgttggaggaagctgtcaagtgagatctcgggctaaataatattcctaaagctttggctttttaccgtattgaacggcgtagtgtgatccatgatagtgggataagactttattgttgttgtaatccctcttaacaacttcccccaatatccttcttggtctctatctctctcccttttcacagtactaaaatccactttatatgtgtctaaagtctaaagcacactttaactgattccccatcttcttttcattgatgtcacaccaatatctgaataccaacatagtgaggcgaatcaacttaaactccaaaaccgccccaaaaaaactactacaggatgcttaaactaacttatgaataaactataattttcataaaaacagagacaaaaaaaaggagataataataatattataataatcagaattagaattaaaccaacctggtcagctccagaaacaaaaacaggttcttcggcaaagtcccttgaataagtcacggcatcctccctctccaaccactcctcacaactctccgattcagaattccgatcaccgccgccgccaccaaccaccgcacccagccccaaatcgttgccttcaaccaccgcgcgagagcggtagaagaagacagcaaaggtgtcaaccatctcagagttcttggccatgtcgagccttccgagaaacgcgatctccgcaacgacgacgagggcgacgaccagcggcattagattggtccatttcctcttcgccgcgccaccggaaaccgccgaaacgggtaaagcttcttgttgtggcgctgcttccgttctcgagcctcgcagatttgacaccagacccatcgatcaaaattgcgcgaaagagagagaaaaaaagccaatgaaaagaatggaaacggaaatgaaataggtggcttatggacgtgattccatgaagggtaaaaagggtggaagcttgttgttgttgttgtggctccctctctctgtgaggaagaaaataaagataaaaatgcaaactttttgtgctagttgccgaagtggcaaagattttccatattcaaagtctacggtacggggtggtgctgctactgtgatgtgcgtcactgaagccaatgagcaacgccaaaacgacctgaaaaattaattaacacacggctacaacaaacaaggtcgaaaatacttataagtttcttttgggattaattatgaatttggtttcgaaattatttaaaatataatcaattaaattctccaattttaaaagcttcaatttaattaggtttcttaattgttaaaattacatcaattaagtctcttaagttggtttgatattaatacttatggtgttaagtttggtacactcacatgtgatatgataacctcaaaagtaagagtcacataagataaagataattttgtgacttaaattaagggacatgataaaaagaatttaattagaatgctataaaatttggagacaaaattaacgtattttaaataattttaaaaataaattgatggttaagttattcttagcttttatacgggtgtttgtatgtcagttcgaatcgattttggtcaaatttaggatctaacctaataaaatttgatcgattcggttcggttttcggaattttttttaaactcaactcattcataaatagtttggttcggtttgggccaacggattacccatttaaatttgatcttttttgtcttagaattattattttatatcatgattcatccaaatatccaatataattaacacaataggataaatagtcattttcgtccctgaatgtatagagacctgacaaactcgtcctcgaaaaatgaaattaaaattttatttctcgaaagtgcaaaaagtgcgacaaatctattcattcgttaatttttgtccgttaccgttaatgaaagagcctacatggcacagagggacgaaaacgtcacaaaaataattgtcaacataactgcagaatatattggatcaaaatgtcagaaaattctcatttgaccaaaacgtcaataagtttctattggacaaatttgttagatcctaaatttcgtttcatttaagggtaaaatgcaatttagggtaaatagtcattttcgtcctagaatgtgtagagcactgacgaattcgttctaagagatgaaaattcaaattttagtgtattcatttacatgtattgcaaatttgctacaactatttgtttgtcttctcaaaccattgacacaggatatttttgtccaatgaaaatttattgacattttggtccaatgaaaacttactaacgttttggttcaatctattcagcagtcatgttggtaataatttttgtgacatttttgtccctgtgtcacatagattttttcattaacggtaaaaaataaatggatttgttgcactttttcactttcggagactaaaatttgaatttccatctttgagagcgaatttgtgagtgttctacacattcagaaatgaaaatgactatttacactaacacaatattatcaaatgtttgaaagtagtaaaattgattcatttaataccatcaacataatattctaaaatagactaatacaaattaaaataaaatattttttaacaagatttacaataatagtttgaatcaaaactatttcctacaaactaaatttttgtaataaactttggtgaaaccaaattttttacaactagatttgctgaaacaaatgaacaaaatataatctattaatattataaacatttgcagtttcaacacttggagtccaatattaacaatttaaatcaaaccaaataactttaaaaattttgatcggttcagttcgattttaatcggatctatagatctaaacctgtgacccaactcgtacatgaacggttttgatcggttcgattcgattttgacccaaatacataaatgatccaacccaaaccatccaaatcgatttgaatcaatttgaattcgcggatgacccgtatccgtgaacacccctaaccttttctaacattataaaaaaaaaattcttagcttttctaactcttgaatttggtttggacagacgggttaacagtaccttttttccatttaattttgggcttccgggctgtggcttcctttcaggtccatacttggtatttttcatggaaagttttaaatctttcaaatgtatttttttcccctaaattctgttacctattaaataaaaaagaattgagtgcattttagtattttcaatatatattgagtttttatttttgaaaaaaacttaaatgcaagttcataagtacttttggtgatcacctatcacaactagagctttatttcagtatcttacgttgacttttgatacagacttttattataaggattataagatgaaatcccaaaataaaaacataaaaaagttttaaaaattgtatttgagagacttcctccaaattgtctactgtataatttttattacaaaaaaaaaaaattaaatgaagatgcatcaattaattaattaatttggtaaaaagattaagagaatggaattctaatacttttaaagataattctaaaaatatataaattgttgacaaatataattctacttaataattaactatttaaaaacctgattatttttaattcttggaaaaatatattatcaagtgcgtggatcaaatgcttcggcttaattaatcaatgatctaaaattcaatttctaagtatgcgattattctgaacatttagaaggataattttgttagctaataattttatatagcttaaataagatttttttagctgaagatccctatgttttttacaaaaagataatgattgtctattcgtctgtttttttcttttatgaggattcgtctttgctttggcttgaaggaaggagcaataaacacagaaaatgataactaataatttaatttaattatcgttgttatcatcgtggaaactgaaagttccatttctaattcttagtttccatttgctgatgggaattgaaatgttatcttgttgatggataatttgccagcgaatctgatcagtggttatttctccacaacttgtttttttctttcaacaatttctttgttgggagatgtgattagataacgcgaatgttcacaaagatggtaactaaagacactgagaacatgatgccaaacctgctaaggtaggtagtggagcagttcagtgtgtttttcgaagttcttattgttagtatttcccataaaaacaactgaatttggccaccttaaagctgtagtgcaactaattaatctgttcagattaggtattgagaacatgggagcattttatttattctactatagatttctattttctattttgaggaatgcgatggtttgtatctaatttaaatataatattgaaggtcatatttcatgaaggttctttctcatctttttatctgtgtaattggcttcaaattcaatgttaatgttgtgtgctggtattttcttttaccgcaaatatttattttggacaattttattcaagttggatgagaccaaaaaccatgagtggtaagggtttctttctaagtaattgaggtgattacatggtcaatgtttgaattttagaccattgattaagttgaagtaatttttgtatcagttgattcatatgttcaatagatatatattcttattatgagtgtatttgtcatgttaaataaactaatttgtagcttctagctaattcataaatcaattgctagtttagttggctactttacaattttatttaattatattagaatgtttgatggataattttatttcaccataacttataagtttgtaactatttttccttcttattatgggttggccatgggcccagttcggagacgtaacaacacaaggtccatggttaaatgagatcaatttttttaaaaaaataaatatgcttgtctaataattttttttatataattttaagttatgcttataattaaattaaaataattattgtgtttgttgtttttttttatatatttttcttcataagtttacattgaatgattttgtttactcaccgtgacatattcacttgtaatcaatctatgatagtatatattttttttgttgttgaatatagtagacttaaaatatttgttgtttttaacaaaataagaaacaaaaacaaaattcaaattataaaaaaaataaaactaaatgttaatatgttaataaagaataaaaatatatttaagccttaatattaaatgataatttgttgatgatggacaataacaatctaattaaaatattttctttgaaagacaaaatataaaattaattaaattaaattataaatataaaataaatatttaaaatctataagtaaattaaaattatgaagaaaaaaaattgatgggttcctcgcaggttaaattttgaatgaccaaatcaagattttattattattattatttcagatgctccggccataagattacacttgcgccaccatgagtgtacacctgatacttcgattaattcaaatcaagctgatggactaatttttcttttaaaaagaagtctctaaatgactttttggtaatttgcacaaattaaattccttaccaccttgataaataagattgctacccgactcttttatgtagcaagtaaatatggtaaagaatcgtccaattcttctaatggaatatgctttactataataagactaagaaaagaatgatcatcatcctctctcgttcttggtttttttgtaagggcttcaattataatactacgaatatttatatttatctaaattaaataatagatacaacacactcgaacaaatggaggtgaatgtgattgttgatttcaagcggtcataaactaattagtagtattggacttgtataaaagaagtaagaaccactccttacacagggctcgttacaacacaagctacaattcagatagaagttttacataaaaaagttcacaaaaattttaagcaagtacattaaacgggcacagctaaacttgccacctccaacaatacttattgaacagtatcccgtgatcaacaatttgataagatgaacgagatgaacaagtcttgaaagacaattttattgcaccataccaccctaaaaccaagggacacgagagaaaaaacgatagcgaaccatagttcgacgaacatacatgccacaactttcataataaaatctcatcgctaagaaaaaaattcataatcattgattaaaaatacaactccaactgataaatacaatatactgtaaagatatgcatattggatatctttaccttttcaactatttgaagtacaattattgtaagaaaacttaatgaagctaactaaagaaatgtaaaactaatctaggatacctaaacagttggttaaccatccaaaaattcatctaacaaaaaaatcttatataatcataatttttatatgtatatgcaaattgttatcgaaagtttctccgttacattatgttacatcaaacaccttttgataacctaaccagcaataaattccacaagaatagagttgttgccatgttcgattttcctttacacaagtctcaacaaatgcaaattgtctattctctcaatttgtatcagcatccactgtaaaatctgagacttcaattctgtgttgcatatacttaccttccctttagaaagtatggcagatcagactttgggaaatggtagctcactgggggttctgatagcaattcatgtcctttattttctgagcttccgcattactactagttgaaacctgcagattaaaggaatttgaaaagctaagaaaaccaatccaggttatttgatatttttatcagacaaaagaataaattctgctctacttgatcactgcttgaaccgtcagctgtagctgtcttcaaccttttcaccaagggcatgctgcttgacctggcttcctcatccttaaagttttgatcagtgacctctatcaaaaatacagataaaaaaaaaaaaaaaaacattaaattaatcccccccaaaaaacttacagaatatattgtacgaccttattcctggtccaaaaacgatcttgttgtctaataaattatttaaaagcatattaggaagaaacaaacatttgatgcaaaattcaaattttaatatgcatcgttttagaatatactgttttttataatatctaaaaacagtctctttacatatgcaagtgtaagactacgtacaatgatcctccttaatatcttatagtgaggattgaggagctttcgggcactaggatacgttagttttttctttatactgtttttaaaaataattacaagcattgcattactaaacataaatactgttccatggatgacccaacagctccctgtataagctgaggaataaatttacttctccaaaatagcataaatatgttaaaaaaaatgtaacataacaataaatttctgccagtgcaataaatttatacttgactgaatccaagcaccataagaaaattatgtgaaaccagtggtttgtacagcatgttgtgacgtggttcacgagtacttaattagaacaggagaacaagaactcaggtactctgtcaacttattgtatgtatgaggaagagtaaataaatcaaccacattaaatatccaactctcagcataaaaagaaactaaattgtatatctatgaaggccaagaatcagaatctactctccaacttgactcccccctccccttcggtttgaagtttaaattattagttcattttacacaaacaggcttcaatcacttcccttcagacaatattattccaaaaagttgtcatgttgaaatttgactcttaatccatttcagcacacatgaaaatagaattacaaccaccatttgaaaataagctttaaattttcttaaaaaatcttcaatgcagtgtggttaagcaattacattaaaaataacattaactgcagaactgattcagtgacaagaacatgactgatccacaaacagatcataaagttatacatatcatgtataaacacaagaaagatgaggtatgtttcattttagttatttccatgattccatctagacaacaacatatttccttcttttttatccatacaaggatatacaatgagaaaaacaacaaaaagttgcttgaaaagtcattattgctaaagttgtaatttgtaaatagatgatgccactgtcatcaatagtggtgtaaatgagttgtgttgtttgtgatttattcaagtcttacggattaaatgctccatcaggctcataaacaaacaaactcaaacttaaagttaggcttgattatttcatgagtcaagcccaagttttatagacttgaagtgctcaactcaattcttttacacctcccgtcatcatcaataacaaaaagacatgcatttgttcaatattttccacctagtggggtctagggagggtacacttatacattcttaccttcgcaagcagagagagtgagagactatttccaggatttgaacctgtgacctccagccaggtcacgaccttattactatgctaagagttgatatttggaacaagtttctatttgtaataaaaataaagtaatcatagaatttcattagaatatagtcaagaaagaaattcaaattaaaaagtgtaaaattattaaaaagggaaagattaacaaaaagtaagtggacctgacccattgaattatacctatatttactattctgatattcaaataggattaagatgaaattcaaacaatgatttttttatcacccttttgccagtaacaattttttttttttcaaaaatattaacttcataatataactggtaatctttaaccacagatccacaaccaagagtatatatgagccagcatcaataagcttttatggaaggtaaattaagaactaattgatacacagcttcctctgtaccatggttcaaggcagatcatttagacctgataaaaattgagtaactccatgttctgtgaagttttaaataactgaacaagataatttgattatgtaactgctgattaaactatatgcgtgtattttgagaaaggaaaacatctgtatatctatgacagccgtgtgtggaacaaggtgaaagacaatgtagtgatagaaagtatcattatctagcctatatgataaccaacgtgcataaagaaaatatatttcaagctacctgtagtactgcaagccaagtctagatggaatgagcggcaaatacattgcttctctaaacttcttggtgacctgtcagtaaatgttgaacttcctcttgcatgaatctgaatctcttcatcacaaagcaagccatgattgcaggtattaggttctctcaaactacagcctccatccacagatgtaagttcaaattgacttcctgcaagaacatgagaatcagctgtgctctctaacataggtgcaactctttgaaggttgatcttcttctggcagccatcttgtagagccagagactgaaagcaacaaaagataataatgtttcattgtgcagggagaagtacaaaaattagcacatatccacactacagagatagtatttggatttatgtctgacctgcttaggcatattatgtgaattttgcaaaattctacatttatatgcgtcatctgtgctatttcttaagctccgacaacgtaaacgcatagaacgatgcaattcattcacgaatgaggcctctaaagaacgaatatatagactgtgctgctgatcagtccatcttgtcgactggtcctggaacaaaaatttaagcttagtatatccttgtcaactaaatgaagagaaatttccatcttccatggaaatcacaaacatggaatataatttaatattttcaatttcaaactatcatatttatcagaaatcaactaagcttacaaaaatagcctttgaaaataagttatgtcaagcaacaagaaattttaaactcatatatgaactaaattagtctatctatacaattaacaaatttaattataattccaataaccaaacttagataaactcaaaatttagagccgatcaaaagtatttaaatgatgcttcctcttaaatcaaaatctctcatgatctataagtttaatattaaactttctaaagctttttcaagtatttcatatcagcttccactgatacaaaatacgctttttgacgtgcatttgagttaacatgccaaggagaaaagaacatcaccatttaagcagtagatacaaaccaaaaacacacccatttggtgctaaagaaataatttaccaaacaacaaatgctaaacggtacagaaataatttaccaaacaacaaatgctaaacggtacagaaataatttaccaaacgacaaatgctaaacggtacaaataaatttggacaaacaggtgcacaaacacacttacgcaatttctattcaatttcataattaccttttttcatagaatcaataaaaatatctacccgcctgctttcatgcaaaattcttcaaactgtattgtaaatttgtaatgctcttaagtcttaccaaaaagatatttccagcaacttccaagtgaattgtcttcagatactccagttatatcatacataatgcacaccaaacagatatcttactaagatgtgtaacttaaaggcatgtttaagaggccaaatataagaaattgagaaacaaagttgattccaaagaatcagcatccacagtcaaaccttacagaagccaaactgtttgcaaatttgtaacacgattgttgattattgatttcagttacaaaacggctcgacgctccttaccacattagaataattctctacttttcctactctagttttagatttcagatattttttctcaactcattaattactgaatttaaccaacttacttaataattgcgtgcgattaaacgccaaaaaaagcaaaacgcaaacgcgcagaaaagacatagaatccaaaacggataaattacagacacgttctcatcgtgctacgaaaacacactctaagatcaatctccgaacacgcaagttctgacggcaaaattaaagctaaagcgagaaacaaaagcgaaattatataaataaataaaaaatccatcacgaggtttgcaagaggaataataattcgaaaagagtgaagttgtcataccacaggcggagcaggcgctgcggagtggtgatgcgagaagcctttggagttgttgtcgacggtgacggaggaggaggcggtggcggagcgagcgagctccggcaatggtttgggatcggatgttaacggcggcgagtggcggcaacggagatcgtgttgttccatggcgcgtgatcggagttttttggcagagaagaagaaaccatctgaggaaggtgaggaaaaagggctccacatggcttcgcttttacacgtgtcagtgccgtcgttggggtgccacgtcatcggggagataatatcttggggtagtgtgaggcagatattttgtagagtcgttgaatgaagagtgtatgtgagttattgggcgcagtaattagcgcgtgcaactcatgccctattttatcgtatccgcacatctcatatgtgcctagagtatttatgggcagcgtcactaatggatcctgatccgaacttatttgaactgatctgaataatttaagttggattatttatatatttgggtcaaaattaaatagaattgattaaaattgttcatgtatgagttgggttgggttacgggtttagatttacagatccattgatctgatgatccaatccgtgaacccgtaataataatataaattattattatttatattaaaaattaaaaaataatttgacaataaaaaaagatatgatattgtaaatatttaagattgcattcaaaaataagatgagatattttttaatattgcattaaagaatatgatagaatatttttaagattgcattgcataatataatagaatatttttaagattgcattggataatatgataaaatatatttaggattgcattcaaaaattggttaaaatcatatctttaaattagtataaatagaaacatattttggtgttcatgcatttcaaataatattagagtattagagagtttatgtttgcatcattgacagaattgttgtgagatcatatagaaacttgtgacaagtttgattcttcaactctcaatcaggatttaaaggtacatatttgcttaaggaatataagcgtaaatgtaactattttattatattcttcttcttgactttggaaaaatgtcgcagctaggaactaggatatcagttttgtctctgttcttgatgaattgagacatatttaaatttttagagttgtttggtttgtctttaaatactattaatattgagtctccaaatgttgaaactgcaactactggaacttcttaatgtattactttcaggtatattgttatttgtttcacctttttttcatattttgtttaccattttataattaatgaatcatactttgtttatttgtttgttttagcaaatatggttacaataaaattggttataacaaagtttggtttgtaagaaacagttgtggttcagactattatagtaaatattgttcacaaatcttttattttaatttatattataagtatattttataatattatgttgatggtattaaatgaatcaattttatcactttcatacatttgataatattgtgttaattgtatgagatatttgaaagaatcgttatataaaatagtagttttaaaaaaattaaatgggtaacctggtgatatgaaccaaattgaactgttcatgaatgggttgggttgagtttcaattttttttcttctgaaaaccgaaccgaatcgaaccgatcaaatttgattaggttgggtcctaaatttggccaaaaccgatccgaaccgacctgcgaacacccctatatgcgcctattccatcgctaagtgcatgattagatataagttgcaaatcgaacgtccctaatagcatctatataaataaatcttaaactgaaattttagatactttctttatggatttcacaatgtcatataaaattgaacatcttttaagattttttattttttctttgctgataaatctcattttagatcttagataatttttaatggatcttacatagatttcacttttaaatatttattaaattaaatataattaattaaatgattaaatttaattaataaagcaaggaagaaaaaaaaatatgaatattaagaaatgaaaaaatttaaataatttctatttataactaaatgttaaggaaataaaaaatacataaacttgataataaaaaaagtacaagacattaattccaaagaaaaattaaatttcattatttttgtgattgtaatgttcccaaatatgttccaccaagtctgtttgaagttgttgatgaatttctcttgtatgcataaggcatcttgtttgcaagtatgtagcaaagtcatgaggaataccatgagatacttcaacatttgaaatatcattatttacgtgatcataatcaacatcgacattaccactaaatgtatctcattcgtcttcgacaatcatattatgtaatataatgcatgtcaacattatatccttcattgtatctatgtttcaggcacgcgatgaatcatatataattgcgaatcgagatttgagcatatcaaatgctcgtttcacatcctttctcactgcattttgacattttgaaaataattttcttctggtatcttgtggcattgttatggtcttcacaaatgtggctctatcaggataaataccatctgcaagatagtatcccatattatatggagttccattaattgtaaattgtactggaggagctcgaccttgcaaaacctcatcaaacacaagcgattgatttaacacattaatgtcattgtttgaacccgcaactccaaaatatccatgccaaatccacaagtcttgtgaagcaattgctttaagtattattgtgggtttgcgattatcacctctatgaaattgaccctgccatgcaactagacaatttttccactcccaatgcatgcaatcaatagaacctaacatacctgaaaactctcgtgcatcgccaatttgtagtaggcggtttatgtcattgttgttgggtcttctcaagtactcttctccaaatatctcattgacaccccttacaaatttttgtaaacattgagttgcagttcattcaccaattctaacgtacttatccatacaatcagcaggtgatccgtatgtcagtatatgaatagttgcagtgcacttctacaatggcgagagacccattctaccaacaacatcaggtctcatttggaaatatttatcgtggttactaagagcattgacaattcggttgaacaattgtcgccgcattcgaaacctacttcgaaattgagtctctgtgtatactaaattttctgagaagtagtcattcatcaattgtaggtgtccatcttcacgattgcgattaatgactcttctaggccttctgtgttgattgttgttgcctccttcatgttgcattgcacgcaagtagcttaatatttgttcatcactatcatcgtcaagtgtttcataaacaatttgtttccaaactctatcaaattcattatttcgatccattgtatgaatgattgattgcataaacaagtgaaaaaagaatattgtttgtaggagatgtgcaatgaatgagaattgaacaattaaacaacaaattatgcaacggctagtttcacaacgactagttttataacggctagttttacaatggctagtttcataatggctagttttataatgactagttttacaatggctagtttcataacggttagttttataatggctagtttcataacgactagttttacaacggctagtttcataacatctagtttattaattataaaaaattgaacaaaataaattacaacaaattaaaactaccaaacaaatttgttgtaatttttcatgactctcaaccaaaatgcttcttttccttgaccaacaccaacaattggattggttgaaatgttgaggcataaactaataaggtgtgtatcttctttaattgcaaaggcgattcaaggcttcttttttgtagatgaccatcctatttcctcaacgacagtttcttcgagcccaattttggtaaaaaattgtgaaccaacttcatcatttgaaatcatggtacgattgtttggtgacattgaaggaaatgtttgagaactttgataatttatggttgaaggtttatggttgaaggggtttgagtgtttgacataaaataatttgatggtggtggtggtggtaaaaaatgaggggggggggcgaggaagacaattttctgaattttgggttgaagctttgagaatttatggttgaaggggttttagtgtttgacataaaataatttgatggtggtggtggtggtaaaaaaatgagggggggagaaggaggacaattttctgaattttgggttcaaggaggcatgtgataattttgtaaaaaaattatataagtttgtcaatcaaattcatttggatccatttcacaaaaataaaatttaactcagactaagattggagaaaaaagattgataagtgaaaaatgagaatgaaaattgtgtgaacaaattttgtgtataatgaaccaatttataggatgtttatctccctaatagccatttttttgaactatatgactatttttaagttacagtgtaacaatcaatttttttcatacttttttttcattcctcctcaacgtcaatttttcctcttttctttttcccctcctccctctatcctaacttcatgcgattcaccttgcagaaccttcccaacttctttttttctactccctctctcctctcttcacgcttcttcttctttcttcctccccctccgcacgaccccccacttctcctttcctccacgctcgtgtaaccccccttcccctccgcatgcataatccctcacctcccttttcctccaccttccatttcttcctctgtcgcagtcctccaccttctccttcccctttgccacggccaaccccttcctcttcccctccgtgcgcgtgacctaccacctccccttcctctatgcgcacgcgtcctcttccccctgctatttttttccactgggttgtttgtttctctttttcttcatttctgtttattgtatttttacttcattcatatggatttgttgcctcccgcactttattgttactgctgttgatgaatacatagccgagcatgtggctaagtgtttggtatgtcagaaggtgaagattgatcatcaaagaccgtcaggcctactgcagcctttacatattcccgagtggaaatgagataggattttcatggactcagccgtgatgtgactaaatctgggtggttgttgataggctgaccaaggtggcgcacttcttacctgttcggactgactatattacagaaagattggctcagctatatgtcaaggaaattgtcagactgcatggtgtcccggaaagcattgtcagtgaccgggatccgaagttcacttctaggttttggggtgcttttcaggaagcttttggaacccggttaaggcttagtacggcctaccatccatagaccgatggtcaaacgaagagaattatccagactctggaggatatgttaagagcctctgctttggagcaaggaacccggtgtgatagatactgccactggtggagttctcgtataataacagctatcatgctagtttaggcatgacaccttacgaagcattatacggtcggaggtgcaggactccaacatgctggaccgaggtgggggagagtaaacttcttggacccgagatggtccaggatacttcggagcagattcgcatgatcagagataagttgttgcgggctcaaagtcgacagaagagctattacgatagcaagcaccggccattgcagttcgatgaaggcgatcatgtattcttgaggttatctccaatcacgggggtttgacgggcattgggggtgaggaagctcagtcctaggttcattggtccttactagattctccagagaataggacccgtgaccttcaggctagctttgccttcccaatttttcggaccacatgatgttttccacgtatcacaactaaggagatatgtgctagacccttcgcacgtggtggaacccaacacagttcaaatcatggagaatctgacttgtcctgcacgaccaaccccgattctggataagatggagaagaagattcgaagtaaggttattcccaaagtcaaggtgcaatgggaagggaagacacctgaggaggcgacttgggaacgagagcaggaacttttacaattgtaccccgagttacttaataggtatggatttgaattttgcggtcaaaattctttaaaatgtggggtgaatgttatgatcttgcgactaatccaggtttagaagagtaattacttatattaaatacgtagttagatccaaaaatcttatatgttatgatccaataatgaatccggggtcccgctcctaatggagtgctaacgaggaacccggacacatgagtccgggttgacactttgggaaaaatgtgcttatgaggtaggaattcggaagggggagatcttgggtttattaggtgaccgaggtaggaacccaaaagggggagacctcgcatttattcagtgaccgaggtaggaacccggaagggggagacctcgcgtttattaggtgaccgaggtaggaacctagaagggggaaacctcacatttattaagtgaccgaggtaggaatccgaaagggggagacctcgcgtttattagatgaccgaagtaggaacccgaaagggggagacctcgtgtttattaggtgatcgaggtaggaacccggaagggggagacctcgcgtttattaggtgaccaaggtaggaactcggaagggggagaccttgcgtttattcagtggccgaagtaggaacccgaaagggggagaccttgcgtttattaaggccttagtaaggtgctgaggcatgaacccataagaagggtaaaccttagtttaataagttgtcggggtatgaacctggatgaggacagaccttgaactgaacttgcataagggtacctgagtcatgcataccaaactcaacaaggaaaacttagtagtataatttgtaccccatagtgccagagtggcatcagaagcgtgtaacacacgtttccttacagaaacatcatcgtcttcttcctttctgtgttttcgccattccttagagagagaaactttgtcacctctttccctcgacctaaaccatttgcatgcaactaaaaagttgaaaggaaccacacaatagttaggttccgacctttgttccttctaaaaacctccagacggatagatcgctttctccaagagcccaccaagttccatttcgaagggaaataaggttttagggcattccggcttgggaaaagtcgatccttagctttccttgacgtttttcagaaagtttgatacggaggacgtcagtggttatgaccacgagggttagagagagttggtgtagcaggtaagctctctgttcttgggagtttttccccttgactgtgttccaccatactccaagagagtgttggttattgtgtgtcatgatgcatgtggtattaaaatggtgtgttttgcttttactgatcacatgtatatgatgcatactatgatgatatgttgtatgaatgatgagattctctggccagtagaatagactatgtatggacttcccgaatagtcaaagtcatgtggaacaactcttcgtggtcaattaatatgaatagaaaacctgagagattgtgccttaagtggatgatcttctcttggaagagccatatacgtcgaaaagtcctgagactgtgcccttaagtggactttccgacgtatatgactcttctaagagaagatcatccacttaagggcacaatctcaggacttttcgacgtatatgactcttccaagagaagatcatccacttaagggcacaggtagtagccgaggtagtggctaagaggccgagtagtggctgggttccgctggaaccttaaaccttaggagctcagatgatacttcccggactaagaggtcgagtagtggctgggttccgctagaactttttatattatttttgagagcatgttggctcactgttttcttggtatatatgaatgtatatttatgtgtacgtgttatgtaccctggacggggaaaaacacagatgatgtaaatattgttgtatatattttgaatctctggtgcatgagttacgtggttaccattccttatgcggagttttgttgataacgtcgttttgttagttgctttcgtattaattaattaatcgattcattatctttaattaatcgctgcgcttaacgatcataactaaatgttaataaaccggatgcatacgaggtgttacatatctacatagttcttgtggaagaactggatcttcaaatgaagatcttgatgattgttttattactagatctggagaaggttagatctttaacttaaaatatatcctcaagatccaatattaaagatgttctaagtaaaaagtaataaaatgaaatttgcaaaatatattagactggaaatcaaatatgttttatgtaatatcactaaatttaattaaggtaatttggatgatatttacgtaattaaacgaagttacaaaagggtagtttggcctttgtcgaaggtacgggtgtagttagtaattgctggacgcacccctgtttcttgttaaaaagggacagaacatgttttgtgcctatttctccttctctttgcttctcctctgattttctctccactcccaagctctgttcttgccattttcacgtgattagtggttgaaatcacaaaacaagcaagaaagaaagccctcttctttgttctttgttgtttttgagccttgggtgttggtgatttaaagaaaagagtgggttttgaatctacccattgtcattcggcgctgcggaaccgtgattggaagccgtagagtgctggtctaccctccattgtggtgtattgaactctaaggtttgaaatctcctcctatttctccttgattcttgaggttagggttagggtttggagtgagattgatgtatgctgagttttagagggtgaggcagttttgaagtatgatttggagtgggtagaagttgattttaagctgatatggtgttctatgcataaatcatgcatgcttgttcgtgacagccaataacacatatttgggcagttctggttttttgtccatagcaggagctatcggtgtctaaatggtatgaaaccagtgccatttgaaagataagagagttaggtttgctatggaattttcgtgctttttttggagactcatagaaattgtggtgcagagttataacagactgttatactctctttttagcagatttttctgttgcagagggccattttgcagaaatcataactctgtctaggatgatccaaatcgagtgttttcagtggatatagaaagatgggtatgctaacttcatgcctgtaaaatatcagctcatttggacgagtgacctggtgtgggttgtcctcgaaagatggctggttgagtggtctgttgctgtcagcactatttttagtgcgtgatagttctggtttttggtttgctacagaggctgtagttcatggtttttgatgaaaccagttttgtttaaaatataagagatatatcttgatgcctctaaattttcgtgattttaggagcttcccactaggagttgtgatttttctaagtgggtgtaaaatctgcagaattttatgcagcagcttatgtttttccgtatgttttgctagaaataaatgctttgtacggataggatggtgtttgatatgtgcttgtatgccttgttagggcgtgacactgagggtgttagtggcgtaggccacggagcagggaaagaactgcagagctcggctttgccaggtaagttcttggtcccttggggatgtttcccacttgctgtgttccaccacactccgagggagtaatggttgcattcatgatgcattcattgatggttgttgcatcctcataatgatatgtatgcatgcatttatgcttgagaaatgtatgatacctgttgatagatcttctagccagttagatagatatgaacctccctaggagacggttattcctcctagttggtttgctcatgggtgatgatgatcccgaggtgatgatgatcccctaagaccaagagataggtgtgtcccgtcgcgattgattgcctattctcggaggcaccatatacttgcgtccatgcgtaaggggtagctcccgatgggatggcacgggtgtgaattccggtctcacacttaggttaggcgttgatgatgatacgccgtacatagagcaaaatgacttgcttgtattactatgagggccaggaggccggaccaggtggccagtatgtttgtgatgccttgatgacgtgtgtcatagagagtgagccagggtggaggagatgcctccaaggaccctgagcttactgagatgtttatctcaccccgtgtggggcttatgttatttcaggtaactcttctggcagagaggagcggtctctgggcgggaggccccagtagagacagtgactgcttggccgtgcggcagcagggagagctgggtggctcagatgtgttttgatgatgttttgtacccctgtagagggaagatatgtgtgtgtacatacattatgctttgtatatgctatgtatgccctcgtgtgaggaaggatctttgagatcaaggtgatgtatgcctattcttttgtatagacactttgagtgtcagatgataatttgtacatgaccagtttatgttatgtaatgatgttttcttctgattatatctgttgagatatttatgttgatctgcctatggttttgttattctggatcagcaggggcttgtgttgtcttgtgatgagatgttgttatgttccatatataatgtaatcaagaaatatggttttcgatttatgctttcgcaaaagtttttaattaaagtgattaagcgatattctgataaataataatgttaatacaccgggtgcacacggggtgttatattttaacttttaactcatttttgttctggtcatggtatcatcaagaagtaataattaaattttgttggagtaaatatacacaaaatgaatattttttctaacatattttattttatatttaattatcaatcaattcaaattttgaacaacttgagtaagagagataaatcgttatcacttgtatcaaatgttgtaagtatgctctaagtcatcttcaacccttgattcataaaaccaatttccacttttattaatgctttgttttgttgatattaatattggtaataatttttttaaaaaaattgtactaacttatattatatttaatattcttaataaattaacttgtcttgaactcgtaattcataaactcaatttccactttcgtgtatatatatatatatatataataaaaagtttttttttcatgtaagagtaattgattacttaatattatctaatttagaacaagactcatttataatgtttcagtcaatttaattattagttttctttatttaaattaattggttcattttcaatcaaataataaatctatctctcatttttttatatcatgatatttagtgacctcattttatttaaattaattttatgactaaatgtatttgtttattagtgaccgaattagacaccacaatttatttgatttattacacatttaaaattcaattatttatttagctattgacaatatcgattgttgatttggacccaagcaacatagtaaccaagtaggcattcaccgaatttatgaagtcgagactggacatttcggtcgttaaatagcaactgaattgtaattcggtcactgaaaagcttagtgactaggatttttggaacacacatatttcagtcgaattttggttgctaacagtttgaacgattgaatttaacgatataactaccgaatccttggtcgctaaatcatgttttttttttgtagtgaactatgggtataactgaatctgtgattctagacatatttcatacattgattcattgatggtctttgacaataattttttttagattttttaccaatgtaccggtcttttagacctttagtcaaactttgtcggtgtatgtattttatgtggaaaaggaaatacttgtacaatcattaaaaaaaaaaaatatttgtttagttttttttttttcacgtatgttatatttaatgggtttggcagaaagggaattgagattcataggatttcacggcatcaataagttagagagacagcgacaaaaggagcctcatggagatcttggatttgcacaacaccaagaacgtgaataatttgttcatggattccaaaacgtttttagtttctcttaattttatttgtttcagtctatttttaaaaaaaaaattataagatgacttatttataacttttgccttttcaaatactacttctaaatttattttaaattttaaatagattctgagttaaatctagatatattgtatcatatggaagatatttttagataaataaaatcctaaaattaatatcccttatctctttataagatctgctttctaaggcttttaatatttgtaactgaaaggtgaaatttttctctcctaacatgtatcctcttcttatgttttttaattttaatannnnnnnnnnnnnnnnnnnnnnnnnnnnnnnnnnnnnnnnnnnnnnnnnnnnnnnnnnnnnnnnnnnnnnnnnnnnnnnnnnnnnnnnnnnnnnnnnnnnnnnnnnnnnnnnnnnnnnnnnnnnnnnnnnnnnnnnnnnnnnnnnnnnnnnnnnnnnnnnnnnnnnnnnnnnnnnnnnnnnnnnnnnnnnnnnnnnnnnnnnnttatctttaaaatttaaatacactcttagcatgcatatcatatattttcgtatgtttataatatcatatgaaggatttaatttaatttgtgatcttttcatttccaatatctgtagttgtaacttaaatttccatatttttttaaaaatttattattaataaatgaaaaatacaatataacacaatataaattgtttattataagtctaaaacagtatttatatgttcaaaaaatttacattatatattttaataataatataatctataaatttnnnnnnnnnntcaattgagcttagaagtacttatgatttgagtatttacataattataacaatacctaataaataactagattataattgggtattttaactataatcataactagtttttaaaatatgagtataatttgatataactagttattatttttaaaatattggtaactagttatataacaaattatataccaagttatatctaaaatctcttgcataactagttataaatgaataaaaacaaattattttaaaataatcatttatgtgaaagctagttatagttttataactataactatttttaaataaaaataagttagttaaaatactcataactataagatatttattttaaaagttaacaaatccatcataattttaaaaattaataaatctatcataatgagagtaaaatatttttttttaatcaaaattgaaaagttgttatatattttcccaaactattcttatattcataaaagaaactaatcattcatctaagttaaagagagaaagcaagaatcgaatattaaacaatggggtcaagaaagtcaagaaagtcgcgcggtccaaaggatttattgaacatgaagatcgtaaaaaatcctaggagcaagaaacctactcaagttgttagacgaggctttcaacctaaagaatttgacgcttcaaaaatcctcaataactggaaaaagaaaaattatcgtggaagccacaaaaaaaacaatgagtcgcataattcaattgagagcgtggaggaatttgtgattctcggagatattccagaccttgattcgttggtgatttacgagaaagaactatgttcagattttttttagcaatatttcgggctttcccgaaacctcttgtgaaaggaaaaagaaagaccatagcaatagttataacaaagactagtcatattatctaactaagtataactgattttgtgattcctaattgattcattgatggtccttgacaataatttttttcagatttttttaccaatgtattgaccttctagacctttagtccaactttcttagtttgtgtattttacgtttcatatacaaggaaaaggaaatacttgtatagtcattcaacagaaaataaatgaaataatattcgttcaatttttttgcaagtatgttatatttaatgggctttgacgaaattaaaagggaattgagattcatagggttgcacaacatcaacaagttagagagtttgttctttggtttcagcggcaaaaggagcctcttggaggtcttaggtttgcacaacaccaagatagtgaataatttgttcttggaggtctttggttttagcaatgttttgggctttcccgatacctctagtgaaagaaaaaagaaagatcgtgcaaaagttatacacagacgagttgtattatctaactataactaagagtataactagttttatgatttctgaagaagttcttgacgttaattcattgatagtctttgataatatattttttttagatttttttaccaatataccggtcttctagaactttagtccaattttcttagtgtatatattttaccagaaacttgtataatcattcaacagaaaaataaatgaaataatattttcagtttttttccacgcatttatcatcttctccagcttcgtgccgccccacccgcgagaaaagaacggtgtacttatcctgctgcggtgcatcaacacaaagggatgttgttattgttgttaatatgcagaattagaatcgaaaagataaaaaatttgtcatcaaatccaaatatggatacgagagagaaggctgctcttaattatcaactttatttttaaattatttaaattatttaatgtgacttcaaaattattaaaaggatgaattttatcctgaattttaaaataaattaatttgatccttaaatttttaaaattgaatcaatatggtcctcaaatttttaagaaattgaaaatcaaattaaatcatttaaagtaatttgaatatcaaattaattatttttaaaaatttgagtatcaaactgaatttttaaaaatttataatcaaatttattaatttttaagaacttaataattaaattaaatattttaaaacttgggatcaaattaaataattaaaaaataatcaaagatcataattaaactagtcacttagtatccaccgaaaattcaaattatagatggaacccaggtgaaaaagcgtccattgttcacaacaataaaaggggataaataatttcaatttattttctctcttttattaaatctagcatgttataataaaatttcatcttaaatttttttataaatagtcatttttattcttaaatgtgcaaaatattaataaatttatttctaaaaaatgaaaattcaaattttaatcccaaaaataaaaaaaaaggaagtacaacaatcaataatttttttatcaaaacttatcaaaattgaaaacttgttatatattttcacaaactattcttatattcatgaaagaaattcaatcattcatgtaagttaaagatagaaaacaagaattgaatattaagcaatggagtcaagaaagccgcaaggtccaaaagatttattggacatgaagatagtgaaaaggcctaggagcaagaaacctacacaagttgttagacgagacattcaacctaaagaatttggagcttcaaaaaccctcaactagaaaaagaaaatttattgtggaagtcacaaaaaagcaatgagtcacataattcaattgagagcatggaggaatttgtgattccaatagatattccagaccttgattcgttggtggtttacgagaaagaattatgttcagatctttttagcaatgtttcgagttttcccgaaaccccttatgaaagaaaaaagaaaggcggttgcaaaagtcataacaaagacgagttgcattatctaactaagtataattgattttgtgattcctggagatgttcccgacgttgattcattaatggtctttcacaataattttttcatatttttttaccggtcttctaaacttctagtccaactttctcagtgtatgtattttatgtgaaaaagaatctcaatcacagttttattgattcataatattcaaaatcaagaccaggaaaacaaatagactactcgaaccaatttctctctagtatattaattaccttcatttcttataatattttccttcaaaaaaataacttctcttttctgaaaagaatcaaaataatttatattcatgattttttaatttcccatgatacttccttccaaaaaaaaatataaaaataaatcaccaaacatctaaccccataaataataggtgtaagcacggatgaaccccttacttattccttttaacttggctttagtggaaatacttatttttatgcaattaagattgctaataaaaaaatatttttaaatttttaaattatattataattaatattcatgataaattaactcgtcttgacctggtaattctaaacttaaatttcattcttttgtttttttgggaaaaaagtggattacatgatttcggttactaaatggacgagctaaagaacactccagacccaatatcaattaatccgtactttggtcattaatatggtcgaaataatgggttggtgatctaattggtagatcagtaattgatttgatttgattcagtatatattaaaaattcaaaattatatatatgtttattatatataagtatataattaatattatttgaataacaaaaatttatccatatttcaaaatccaaattaaaaaaattcatttttttataaaaaaaattgatcgaatcggtccagtccaatcggaatccagtgatgaacccagtcagatcaactatataaccgatccataaaatactatttggacttgtaaattgactcatttatccataggctttgtagactggatacaagtctaaaaaataagtccatttattttatggattggaccttaaataggttggaccattccatacaatacttaatgtaagaaggaaattggcatnnnnnnnnnnnngtgtatttagcaaaaacaaaaaaaaaaaaaaagatttgtaggtgtacacaattaaattcttattaaaatctgtttttttttcttaaattagcaaaacacttattttggtttatcctataacctaaaatcatcacaaattatgcatccaaaccgttaaaaattaatcaggagagactaaacaaatattttacaaatttgagagattaaaaaatataaattttaatttgaaggtcaaaaaacatatcacaaatttaaagaattaaaaatatatttaagtctattatatttcataaaagatctttcaaagaaattttaatttaatcattatcatatttttatttatcagtttttaatattaattaaagtttgagaaagtgtataggaataaacatttaggtacccaattaagaaagacttgagtattaaagttacttactgtccacgcaaatatgagaataagtacggaaattttgttaaaatgcagtacataaaaaaccttatctaaaccctacacgttaacattccttccctgaaaattgatgagtgatgatataagttgtttaaaaaaatctatattagtcgtgcttatctaaatcctgttgaaaggcttgacaagtgacatcttagatatattcattccatttccatgttctaatcttaaaaaactaagataacactcagattaaaaaatatggaaaatgcttattgttacgaaaagttacgcacgaaatcacaaacgataactactgcggtgatttatgtttcacttatcattttactttttattctattacttttatccaatcaaacttaaacatgtggctttcgacctgtgtgaatttttttcctaccaattagcagtgttaaaaaaaatatatatatcgcgcaacttctaaatatgatgtctattctttttcttcttctcatttatcgtaaataagtaaaataaagtatttcatatatgtatatcatttagatttatattctcataataaagtattcttacaagagtaatactaattctctctgtaccgtatagtatatgaaatatctgaaggctaataaagaagaaaatgtcatgtaaatgatctttttttcttacaaatttttttttgcttaaatattttttccatgcaatttaaagttttttattttattttagttattataaaatatgtttattttatttttttcttaaaattctttaagtaacgctttaaacattaaaaagatgatttaaatagtaaaaaatgctatttaaaaacattttaaaaatgaaaaaaaaacacacacattttataaggattaaaaaagttataaaaataaaataaaaatattaaattacatagactaataatatatttaaactaattttttataggtaaaataagtctcgaaaaccatcaggaggatgagattagattacccataataatattttcacatgaactgacattctcatgagaaatgagtttgacccttaattacggattagactaattttgttggcgtaaatgtttcattcaacgttgagggttatagtatctaatgatcaaaagcatatattatgttgatattttgtgattcttggtcaaatcataatgttgagacataaatgttgttcaacgtatacagagccattggaaactagctgtcaaggtgaattccttgtgcatatattgtgtcagcgcattttggatggttctgtggaagtttagttctggaaagactcggatttaaagtctcttgtccccactaacaccatcttccctttattcaccaatggactctctttattcctcatcttcagagtccagagcactagggcactatcacttcctcttccaccaccccccaccataagtctcctcctttatcgtgctttaataatagaatttttttccttattttcaaacaccatccttatgtgtttcaataaaaacaaaaacatacgcaaagcaaactgaggcacctagtgttcaagattccatattcgtatcttgtaattttctggacataagaaccgagaagggcattccacgtggatgcttatggctggacagacatatattcccctccaaatacgaaaaatgtttcttacacaacattgtgagagaaataaaaaataaaatgatagataaatgattaactttataagaagaataaaataaactaaaaattattgattgagagtgtttaaaacttttagatgttagatataaacactctacaaatgttgtgtataaatttcttaaaccattttgttaaaaggatttattgtaatgcgtgtcttgaatgatgatattcagtctttatttataatatataagtaaatagtaaataagagaataaaacgtaatctgatactctccttaaactagagcatatatatgatatatgtgatatgaactaagtttttcacaaatatggtaaacttaagagaaaggaaacgagtaaacgatggctcaacgaaaagaaaagagagataatgggcaggggtagaggtaaagaagagcagtgggaggcttgctggaaaagggcgtcacacagcggtgtggtacggtggttgtgaaatgcaagcaccagaggggtagtcggagtgcgggaggcaaaagaggcctagggaagagccggcaactaggtctggttggaaaaagctcatgtgtcgatttggtgtaagtgcgtcagctttgatgcgctggaaagggtagatggaaatgacaaaccaggttaggaaacaacaaaaaagtgacagcgctcgaaagaagtgacacagtggcagaagttgttggtaaatattttattcgtaatttaatattttaaatatatatatatatatatatattcttaaagattttttctaaatatattatgtttatcaatttaatcttctgaccattaaactcctattattttgggattgaatattagtaacgttagcatttttgtaggtgaaggagagttgtttcattttgttttgatttttaatgttacaagattattttgttaagcttaatgattagttctaactgtaattagtttgttaagcttctttttcttctgcatgttgagagtagcgcaaaaaatgtgctgcaattttttttaagatgctacaggttggtctctctctctctctatatatagacaaaagtagaaaaataatttgtattttcctctaaattttgtctatttttgtttttataaaaaattacttgttttttagagaaagagcatttgtgtttaaaaagttcgggatgttttagctgtacatgataagaataagcgggttgtcatatcttggaagaggggtacaatcagattctcctttattttttatattgcattgttaacccatgtttttcatattctaaagttgtattgctagtggtgttcttttattttctaatagtcttagagagaaaaatctactttcttcttgcataatcttttctacattagcatttagttttatcaaaatgtctgtcatggatatgattagtccctttctagtaagcttgaaaaatttacgggtgaaaactttttctattgacaacaacaaatgaaattttggtttattgaactagatttataataaatggtttctaagaaagaaataaaaacttcaacttcctttattgatatagttcaaactaatgttaccaaatcttccaccactaggcatgtatttctgataaagatattttatttcatggatgcataacttcaacttcctctgctgatatagttcaaactgatgttaccaaatcttccaccactaagcatgtgtttctgataaagatattttatttcatggatgcattttaagtgttttggctgataacatatataagattttttgtcatactaaaacttatgttgagttatgggaagcacttgaattgaaatatggatctgttgaaaaaagtttaaagtcgatactcttgtgaaaaaatgattaagtttcaaatggtttatggacaatctatttcagatcagatccatgaatttgaaaacattgtttatgacatgaaattgaagggaattgttttgcctaacattatgcttgtgactttcatgatttcaaaattgtctcctttgtggattgattttgctcgaagtctgaaacataaacatgaaggtttcacctttgatgatttgctttttttgtgaaatgcatggtattattcatgaaggacatctccgtatgcttctcaatctaatggtattgtggaaagaaagaatcataccttgcttgataaagtgaatgttatgcttgtaagttctggtttgcctaaaaatatgtggggtgaagctttatattctgcatgttatattcttaatagagttccttataaattttttggaaaaccccttatgagttatggagaaaaagagaaccaaatttgaaataagatgccttgcaatggttaacgtcccttttaataagaaaaaaaattggactaaaaactgttgattgtgtttttgttggatattctttgcataatactacttattgatttttggttgttaattttgaagtgtctgaaatttctaataatactattatggaatctagagatgttactttctttgaaaatggttttcctttgaaaaataaattgtctaaacatgtttgtgatacttcttgttttgtagtaatgctaataatgacaatgtttttgaacctaggaagagtaaaagatctaaaaaagctaaggattttggttctgaattttgttcttttctacttgaagatgatcctaaaacttacaatgaggccatggggtctattgatgcacctttttggaaagaaactattaatgatgaaatgagtcatcttaaaactaatacaacttggtttctaactgatctcccctttgattgtaaaagtataagttgtaagtgggtttttcgaaagaaactaagaactgatagatctatagaaaaatttaaggcaagacttgttgagattggttgtaaacaagtagaaggtgtagatttctttgatacatattttgttgtttctaaagttactactattagagttttaattgcatttgcttatgtttttaatttggaaattcatcaaatggatgtaaaaactacttttttaaatggtgatttagaagaagaaatttatatgagcttacctaaaggttttgtagaaccgggtaaagaaaagaaagtttgcaaacttgttaaatctttatatgatttgaaacaaggtccaaagcaatggcatgaaaagtttgatcaagttgtccattcatatggttttcaaatcaataatagtgataaatgtgtgtatgtgaaacaatttgatgataatgggtgtcattttatgtttatatgtagatgacatacttatatttggtagtaatatgcatttcataaatgatgtgaagtctttcttgtctagtaattttgatatgaaggaccttggtcctgtatatgtgattttgggtattaagcttataaagaaagataatggcatggttttaaccaaatcacattatgtagaaaagctattgaagaagtttaattattttgatgtgaaatctgtttctacgccttatgactcatccattaaattaaataaaaaattgagtaaaggattttcttcttataaatattcacaaattattggttctttgttgcatttgacaaacttctctaggtttgacattgcatatgcagttggtagcttaggaaggtatactaataatactgatcattctcattggactacattagaaagagtttttagatacttaaaaggaaccattaattatggcattcattatacatgttttcttgctgtaattaaggactatagtgatgcaaattggatttctgattctaatgaaacaaaatcgacaagtggttatgtctttactttagttggtggtacaatatcatggaaatctgctaaacaaactattatttcatgttctggaacaccccggacgtctccggcatattatcatcaatgatatacataacacgctatcagcgttaactaagcgcggtgcggaagcgatagaatcgttatcttgattacattatgcatggaatataaaaaactcaaaacatagaaaataaagcaagccatatgctgatccagataaaacataaacaacaatataggcagatacataaaaccacacacagaaagtcaggaggaaacatactttcatacaacatcaacatctgtacatatacatgctcaaaacaagaccaccactgggtcatacatcaaatatgtacagtacaaatgggtgtacacacaccctaccactacacagagatgctaagaccggcttcaactcttgaagctctgctctggtcttctactgcagcctcccatccagcctctcaggtccactagggcctcctgccctgaggttgctcctctcctaggaagcacctgaaaaccacaaactccatacagggtgagacaaacgtctcagtaaactcagggttctggaaatcctccctaaccctggttcaccaccaagcataaacaaaacatataaacaacagagctgaggaaattatcctagttcacacatacaaagcctaggacataatcctagctttcacacatcccagccatctgggtccataatcggatgctctcagtatcagaggtattcaacctcgtcatggctctcacagccatccctcagagatcatagccataaccatggcatcagtatctcatcttggctcttatagcctgtctcacagacatctcacagaggtacctatcatagtgtctctcactagacactttccataccagagaggcaccgcctctaacctcataaacattgcctgaggagatccctccactcaggactttgaaccatacaaacattgcctgaggagatccctcaactcaggactctgagaatacagacatggctcatctaagaggccctaggctctagcccccctcgggaagccctctcttagagatacaacatatctgtctagcatctggcctgggaaaaccctccaggactttcataccacatgcctgggaatagccgtccaggacttcataacacatgcctgggaataaccgtccaggacttcataatacatgcctgggaataaccgtccaggacttcataatacatgcctgagaataatcactcaggacttccaacatctttgcctaaggaggaacatccacacagttccatctgtccttaggacttaagtggagagcagtggcatctcccaaggaatctcagctattccagggagtcctcaaactctacctctggctaggaaacctcaactagcctgatactcatccagtattctttagattccatcacagaccatctcatgatctgcattctctcaaaaggctcacagcctcacacctgccacatcaggtgtctcataaccctcacactgtcatagtgtctatcctagggttcatcattacagcccagcacacactaggccatcatatattccatatctctagaacggtctgagattcactcaaagcaccgttcatcagcctctcaggctcaaaacacatgcatatatatatatactcatatatacatatcatatatcacccatcgggtggcaaccagaataaggggaaaaccccaaaacaatgagcttacctggctagccgtggctcacagctctagcctccactgatggtctgctcctctgacaccttcagtgtcaagccctaccaaggcatacaagcacacatcacagaccattcaagcatataaacatgcacaagctcatatagcagtcatccactgcattcgggaaaggaaccacagtccttcccatcaacccaagtcctctactctaaggttcattaggctcatccatcacaagcctttccatagaccctcagtggtctatctcagatcatccatggcctcagagtcattccagactcaaaccaagccatcaccagtgagccttcaagctctctcaacccaaactctcagggtttctcagggcttggacggtctctctcgtcagacaccgtctccatggcctatcaggcacctcaagtccatcacaaaggctctggcatgtctcaaatcaagtgactcagtccaagtcacacatgcctcacctagagccaaaaccaacagtcactaaaacacaaactgaaagctaatccttcctcctgacatcattctaaacacttctctcaactggacccagagctaattctagccctatcacagatgggtcactattcacaagaaacccccaaatccaaaatcaaacggagaaactcgagtttcttacctcagaactgatgaggaaggcctctgggctgctctcccgagccctggtgccgctgaaccactgccattcctcgccaaactcgagctttcatccacctctctggaggttcctcagaatatggaggttttggtgaaagggaggaaggattctcgctctcacttggtttctaggaagattaaagggtttaggaagcgtttagggtcctcaagcaaggtcatgggagcttggggagctctcccatggttgctggagtccagaggaagaagaaaatcatttcttctcctcccaaaacgcgacccctcttcaaatatagtctgcactgaccttcccgcgcgatccgcgcgggacactgcgctatctgggccaggtgcaaaagtatggcgccatcagcgccgcttccacgctaccagcgtgaagaggccgaacctgtggcgcgatccgcgccacactctgaacccagttggcgcccccagcgccaaccttggcgctcccagcgtgatcctcccgaaaccatggcgctacccgcgccaacctggcgccatccgcgccaacttcccgtggttccggcgctatcagcgccaaccgtggcactaaccgcgccacaccctatacagggttttctaacaaaagaacctggcgccaaccgcgtggctccccgcgccagatctcagggtcatcacatgttctaccatggaagcataaattattgctttagatactactactagtgaggctgagtttcttcaaaatttgctatgtgatttgccattgttgaataagcatatacctccaatttcaatgtattgtgatagtcaagttgctatatctaaagttactagcaaaaatttaatgaaaaaagaagacacttaagagtgagacttatgtctattagaaatttgatttctcatggtgttatttctcttgactttgtcaggtcagaaaacaatattgcggatccgcttacaaaagggttgatgcaccaacaagtacttgagttgtcaaggggaatgagactaaacctcattatttagtcacatcaatggacacccgtctctttgtgattggtgatcccatgaatggaattcaacgggtaacaacgaaattgtttgttgactaaagtacaccaaaaaaaaaaaattttttggagttgttccgtttctcattcctatgaccaggtgtattgtaaattgtgacaatatcaaggttgaagtatttacatatgtgctttttttgtataaaaaatacctcttaatggattcgatggcaattattataggggtgggggtcacaaactactctttgaggattcacctagtgaatgtggtggtggggtcactcctatgagatatgggcaaatctctaagtgacattcataaacaagatacatgcgcaaaagtgtgtaacacgcaaccacttattaggacctaaatgaagattaatattgtaggggttgtgtactaaagcccgattaaagaaggtgtagttcaagacaattaagtctgcatttttctggggtggaagttcataaacactagatataaggctcaaacccagaaggttccttatactgaagtaaaatatcacatgctttctttttgtttttatataaattttattttttaaaatgttttaaaattttaaattatgtgggggaatgttggtaaatatattatttataatttaatattttaaatatatatatacacatatagttatcaaaaccgacccggcccgaccgggacccgatagcataaccggtctagttctactattaaatcggttatgcagttgacccagctaaacccgaccgattgaacccggtcgtgtccacttttttttttttggattttttttaaaaaaaattgaattattagcaatagtaatttttgattttggagtatgaatggactttttttactcaaataatgttaattatatacttatatataatatataatttttaatttttaatatatatcgaccgagtcaatgatcgagccaattttaataatactatatatatatatatataatccttttcttaaagagtttttctaaatatattatgtttactaactcaatcttttgtaatccattaaactcctattattttgggattcaatattaggtgaatattttagcaacattagcaattttgtagatgaaggagctgtttcattctgtttgatttttaacgttacatgatttttgttgttgttaagcttagtgatcaattccaactttaattggtttgttaagcttctttttctcctgtaaattaggagtaacattntatatatatatatatatatatatatatatatatatatatatatatatatatatatatatatcactctccttctttagtcaatagacaaaagtagaaaaataattttacattttcctctaaattttttctcttcttgttcttataaaaaattacttttttttttagaaaaaaaatttgtgtttagaagattgggggattacgatcgtgttccaacctagactatttaaaatttctcctttaaattattttcctttgtatttattgtatgttatattacattattaatttatgttctgacatattctgaagttgtattgttattattgttcttttatatttagtttgaggcatcttcttctcatttaatttattttattttattttctaacagaagtaactaattggagtccaaaatttgggaagcctaacacagaattgtggctaacaggtcgtgggggatgatactgctatgatacaatgttgaaaggtttactgtattgtgtgtcttggatggtcacatttaatatgcaaatagaatcaatattgattaaatatgatcaatctaataatgagtaatacgaatcaaatctttaattgttatctaataataaataagagaataaaatataatctggcatattttaatcgcagaactattttaattaaaattaatttactggcttttagaagctggctcctaagaagaagtcatgattgatacccatgcctaatccaatctattattcatctgaataatattctctatattgacaaaatataccaattgtaccaagtattttcttgaatacgttctcctaccaagaattaacggggattttattgtatctaatcccattgattttgaaagctacaatatcaacacgggtccatggagtccaaattcgaaccatctttttaaccaatctttaccctcccctaacaacaaactcactaaattaaatcttcttcttggtgatcaacagaaagcaacaccataattatctcctatttaagtaggtctcaacgtgatgaatccttccatctaaaaggtcttgtgcaatattgaaaaattcttctgagagtcatgcaaccattccatatcctactcctccccttttatttatgtttcacaccgtgcatcattactctgattggtattgttatgtacatccattcttcccccaatatcctcctctctttattttttctttctcttctctcccttcccttacattcccttagttattactaatgcacacttaatttggaaagttctttttctttttcgtcttgcaacattactctatatgggtaaaaatttggtctcttgattacactattcaccacttgcccatgagtccacttattattaccaagtttaaacaatttagataagctattgacgaattattatggggagtataattagtataaatgtgtacgacaaaaatctaaaagtaattatcttgtagaaaatgaagtcatgtaatttttttttattaatcctatttaataagttatcgaataagcaaccctaaatatcatacatataataatttgtactgaatattttctgtcttaacaagtttctgtctgggagctctctgatatgattgatatgtgaagcaatcccaccaatcaccatgcaacaacaatagtcatactgcattcacaccacgtgaagaaatcccacgacattagtttattttttcatcttacttttccacttttttgtactctgacaaattacatatctagcttttactattttagccagttgatcttttagcacgttcgcatgtactcgatcatatgtttatgggcagcacatgatcatgaaaaaatccgtacaaaatagcattgtgataattttgaaaatgaactgaaatcatttaagcaaaatttcatgctcgacttgttaaggaaaaataataattgacagaggaaatcctaataaaaatagttagtcaaattttttattgaaaataatcatgaatttcatgataaaagatattttacacttataatataatataataaaaaatttaattaattatgtttaagtttttcaaatagaatatttatttgtcgagagtcatgactaatctctcgagatataatcaatcttaatgatagttgtatttgagtctattatgtgtgtttgtattgctttattttgtatttaaaataatttatgatttttctccaaaataaaattatttataatgaaatttatttctaatttgtaatgaaaaaattaataaaaatcaaacaaaactaaacattattaaattcattgatttgatgccttaaaaaaggccttacaaaaaaataatcattgttttgatggtatacatccagtttgcaacacaaacgacaatnnnnnnnnnnnnnnnnnnnnnnnnnnnnnnnnnnnnnnnnnnnnnnnnnnnnnnnnnnnnnnnnnnnnnnnnnnnnnnnnnnnnnnnnnnnnnnnnnnnnnnnnnnnnnnnnnnnnnnnnnnnnnnnnnnnnnnnnnnnnnnnnnnnnnnnnnnnnnnnnnnnnnnnnnnnnnnnnnnnnnnnnnnnnnnnnnnnnnnnnnnnnnnnnnnnnnnnnnnnnnnnnnnnnnnnnnnnnnnnnnnnnnnnnnnnnnnnnnnnnnnnnnnnnnnnnnnnnnnnnnnnnnnnnnnnnnnnnnnnnnnnnnnnnnnnnnnnnnnnnnnnnnnnnnnnnnnnnnnnnnnnnnnnnnnnnnnnnnnnnnnnnnnnnnnnnnnnnnnnnnnnnnnnnnnnnnnnnnnnnnnnnnnnnntaaaattttatatccaatttaaattaacttaagattgtatttatatggtgatggcaaataatatgataatcctaatagtagtcaaaacaatgatagtaatgatagtagtaacgttgttaatgttgatcatggtgttggtggtgataatgatgataatgaaaatagtcattgtttaatgaagagatatttattgtacaatttaattcgattttaaaaaaattatccaaatcaaacataaaataataatataattcaatttaattttttttaaatataacatcaaaacatattaaaatattttaagtttacaattgaagaattttttgagatgtagatcatgaatttttccttttttagcaacctatttaatgtactcaactgatcaattatagcaaacttcgttagtctagatcatttgccgtttttcagcaaaataataacacaaaagacttcaactttaaaagttacggagctattagtcaataattatctttttctctctcataatattaatatgaaatatatactaatttttaattaatatttaatttctgtcaaaaaatttaattaactacttttcatccattttttttttcatttatgatgttcaaaccaaaaacctttcataagaaaatcaaatataattttacaccgatgttagtaaattcattaattttcttaaaaaaacttcttttttgtgaatgcattggggagctagtaagagccttgatccccttcaatccaaaacttaattatcggggtatgaatatatttgttgaacttttgcttaataattttagatatttcaaaatttacctattttaatgaataaattatttcaaatatatatatatatatataatatgctcaagataaaaaatcttattaatatagtgacttgactgataactacattaggtgtaaagctatttaaacgatcgatgcatgtgtatagacaaaaaattagattcaaatattcacatctaatcatctaccttaccccgtaccaaggcaccagagaagggttccaaaaactttttatcattgaaacaggtaaagatagtgttaaaaacatcgatttggaactttttttggaacgtataattcaaacaatgacggaacttttttttgaaattttttatttattcatgacatcaatttggactttggagtatttatacatatgatatactatattacttattttacttcatcttacatagagtttctttatgcataatataatcgagtttgatcataaaaaatattatcttcaattaaaaccaatctaccttcttgtaagagtatattattgagtaattttgttaggaaatttggnnnnnnnnnnnnnnnnnnnnnnnnnnnnnnnnnnnnnnnnnnnnnnnnnnnnnnnnnnnnnnaatgaaatctcttaccttaattatatttttctatccaagatttaaatacaaaatcttatttaaaatgatcgaatttaatattgatggatttacttgcaaggttttgggagcaattgcccccgttaacttttaacgttgctaaatatgatacatatacataacagtaaaatgtggtaaaaaaatttaatttgtaataatccctccctttttagtctcattaattatttttactttgttaattagatattttcgatgttttgtttaagtgcattgctaaatataatacatatgtttaattataaaatatattcgtatgatttaaaatgtaataaaatcaatttataatatgagtattgtctaaaaaaatttagactcatttatttatttttctcaaacattctcattattttctctttttacgcttttggatgtgcatctttacaattaattagtaaacaaaattatctccatcatttcaaattacttttattttatttttatccatatactttaaatttttaactgtccatcccttttaatttactctctttaatatatatctttaaattgaattttaaattattttcttaaaattttattaataattaaaaataaccttctaaaaaattttaaattatctatatatttattattaaatttatttataatattattcatattataaattatttaattagtatttaaatttaattatataaaaaaattatcatatatataatatacaaactaaaatactaatttccgtatataaactatggtaggactgaattcaggttttattcgatcatgtttacccaacccgcatagagtcgttgcaacttgcaacatcttattccacttaacaacaccttcgaaatattggggggaagaaaatcatgtatgattctgataacaacaccttcttaaatactggggtaacgtttgcataatcaaacgattccaggagcaaagaagaaggacaacatcagggatgctccaacaacaagtgaagcctaaactaaattttaagtgaaatattttattttaaatgtgagaacaatatattggacctttttataaatacatgtgattttttttctctattaaatgtgatcttttttgttttataaaacctaaaaataaatatattttgttgataaatctaaaacttgaactttagttgtttaatcttggattcatcttggacacaataaattttaaatgctatggccagatctttcaaatcctagagaaagtctatactggagagaaatttgcttaaataaatttttacgtagagaatcaaattgaaaatttgcagcaagactaaattataagtttaatttaaaaagaaaataaaatgagaccaaatcaggtatgccatgggatgagaaggagatataaggttgttctattagttggaaaaggaaaacttaaggtcatgtttggtttaaataaatgaaagaggtgtgaaagtggaaaaaaatgaaagatctgaatcacagtgtagaggtgtgaaacttaagtcaatttttaaaattttaatctcaaatacactaaagatagaagtaatcaaacactatccaagcgtttcaaggaattaaaaggtaaaagaatgaattgagataaaaaagatgaaatatttaaattaaagtaaaatataaaaatatgtgacttatatcaattatttgaaactttaaattttaaatgtaccaaattgtaattaaatattatctaaagtcaggttagtttgtgtaaaaatagaatgaaaatgaataaaattatgcaataaatagtaaatagacgtgtgattcacacctttacactctaattaaaaaatttcatcttaaatcacttttttttttaatttctttgttctctacctaatgaacctaagagagaaaggtgcatgagaaaatcttttcaggatatttttaacaaaattaagaaagacaataaaaaaatgaaatgagaaaaaaaaatccgaaagcttgatgatcacaaatgtaaaatgatgtcggaaagcagcatcaaggaaaatgtggatcctcccacattgcgtactccaattgggcaaacgtcacatcaaggattcaactcactagtattggtccacgttccgtgattactgtggttccattttcgtttttctcaaaaaaatgttttattttacacacaaaactccaataatatgactgccccgaactccgagggctctccttaaatcccgacccgtgtcgaggcagcacaacacaagacacttgtcgactctaccacactccccattctcaagatcgctgcgacacgacactgcaacgttgttgctcagtgaaagaacgctattattttttgagaaataggcccaaacaaaaacactactaacccaaggtaattttagttttctaattttaatgttattttcccctttcattctcaccgccattgtttttcctcttcgtttccatatctgtgcccccataggatgttttttattaatttccattccctttctgtcgaatttggttggctcactcttttttttttttataagggtctcttctgccaacaaattttaatttattcgatatgtgagaccttttgggttttgtgtttggggttttgggtttcggtttttccgatcgccgcaacgctctatggcgtggagaatctgaacactggaggattgaattacgcgcagtagctattatagtttgtttcgggtgagtgagttgtgtgtggaacaagggagtttctataactggatgtgaaatttgtgtaatagtgacaattatttttattaagataagataaaaagaaaaccagcgtggggatggtgacgcgtctcagagatttttgtgatttttttcgccgaaaaaagaaagttgggttctgttaaactcgtaaaagggtgttggtatctcggagaaattagttaactttttccagttagaaccgtgtgtaattttaagttccatctacatcatcagattttaggttaattttaatctaatttaactaactagtacaattttttcacctagtacaaaagaccagaataacagacagcagaggttgaggtttagatctgacttgtctctacaaagttattgtaggtttcaccgttcgcgtagtttggatttttgcggtcatgaaatttgatcactcagaagttaacaaccttctaactgaatgttttgtttcttcttgtggggatagagttgcaagttgttgtttttttgtctttaactctcatgttcataaggagaaaaagatcttgactaatctgaaattcggtccggaaatgaataaagtttggtcaagaattattttgaactcgagtgatatccgaacgatttaaccttaactacacattaatcacttgtgtcaaatgttggtagtagaattgcagttaacttgttaataattaatactaattatctacattagtaccttgtttaatgaattgcttttgttgtcccaatatttttatatggttagatctgaatccaaggaaaccattgaaagtaccacatgatctacttaggcatgattgctacgtaagacaaagtttgcttaagtaagcttctaacgtctgcttcaagtattgttggaaagtggggtcaaaagatgaacttcaggaactttggtgttggtgataataataaacaccccacttgggacgccatgcatgggaagacaccagcaaataataatgttactagcactactctgctgagacagccctcaacaatatactcattgacatttgatgaatttcagagcaccatgggtgggattgggaaggatttcgggtccatgaacatggatgaactcttgaagaacatatggacagctgaagagactcaagccatggtgttttcatccgttgccgctgcaggaggaggagaaggtcataacaacaacaacaacagcaacaacaaccctattaattttggtggtttgcaaagacaaggctctttgacattgccaaggactcttagtcagaaaacagttgatgaggtttggagggacttgatcaaagaaagtggtggtggggccaaggatggtggaagtggtgacaatggtggctcatcaattcctcaaaggcaagcaacattgggagaaatgacattggaggagtttttggtgagagctggtgttgtgagagaagatgttcctcaacaacaacaaattggaaaaccaaacaacaatggatggtttggtgactttcctagaccaaacaataacaacactagcctacttcttgggtttcaacaaccaaatagaagtaatggaaatgggaatttgggtgagaacactaacttagttccaaaacaacctcctcctcctttatcattaaattcaaatcactcccaaagacaagcacaacaccaacaccaacaccagcaacatccaccaacactttttccaaagccagcaaatgtaacttttgctggtgctcctatgcatttgttgaacaatgctcatcaacatgctagccctggcagaaggggagggctgattggagttgctgctgagcattcaatgaatgttggaatggttggtttagccacagctaatgtcacagcttctccctcaagtaaaatatcaccagatgtaattacaaggagtaataataatgttgataactctccaatatcaccacattatgtaatcaacaggggaaggaaattaggtgccatagagaaagtggttgagaggagacaaaggagaatgattaaaaatagagaatcagcagcgagatcaagggctcgtaagcaggttagccaccttacaatttgtcatttaaatgcatcagttagttccactgttttattaacataagaggtataacacatgtgacattgtaaacaactttctttgtcttttacttattttgtatcttaaaaatacattccaaaattagagagacaacttgtgttgtaccaaacttgtgttcaaagttcaaacaaacattttccttaatgggttttttgcgtagagttaagaacatgtactttatgtcatagttttattatttgatgaaatttatgtatgtttcattttgaaaaaataagcccattttgtaggttctgctaaaaagctttggtccactctgtttttaatgggattcatataaaaagtcaacagaacaattgttaaaggtcatttattatcactcttaatcactaattgggcataaccagattataatatcaaaaagtagtatccattaactgaaaaattcatagaaagagagaagtaaaatacattagataatttttttcccatgttatatgatgacctttttgttgcctttcttatcaaatgattaattgcacttgtaactattaaattttgtctctcttgaatggcaggcctacactttcgaactagaagctgaagttgcaaaacttaaggaattaaacagagaattacaaagaaaacaggtatgttgtcaacttgtcattgtgcaccatgtcctcatcactatcagtaatttgttaactgaggttttgactttctctgtctacatttggtttgatgcaggaagaaatcatggaaatgcagaaaaatatggtataataatatcttgtgttctctataagctatgaatgcacttcatttacacggtagttgaaagcctaatacactttcttattctttattttggtaggatttggaccctgcatgcagaacaaggataagtaaaatacaatgcttgagaaggacacttactggaccatggtagattatgtgaatgtgagtcattgtttcaaagtgacatctatacgaaggaagccgttgctatgtcataaggactggagtatatatgtatgtgagccgtgaggtaattgcagtccaaaattagataggttggtagctattgctagtgttattatgtataggaactaggagtgttgagttgtacattaaagttgtatctttggataataaattattatatatatgcttgaatgttattttcttttgtgttgcaggatgataaggtaacacaagcttattgaactgtctctaactttttttttgtccaatttaagttttagttataccatttctttcttgtatttatgaaaggaatgaaatttccatgtattttccacatgtcaaaacatagctaacaagactttgatttaaaaggttgacccttttctcacaacaaacaggttcgattgtaggggtttcttgttagtagacgatgtgtattctttattttaagtttttcagaggttgatggtttatcctaaatttaaaatagagattcatctcagcctaaacttttgtatatcaattataatattttgttcagtcttgttattataatctggattttcaaatcatctcaaatataatttcagttgagaagaaagtaggagtatttatgagtcggttctgattggttatgaatgaaagttgaatctaaatcaattgtttttatataggttgagttcagattttgtgtatgattttctgttagcatgtgttccaatgcacgatcaacccaatcatgggtcgtgaagtattggaacaaaaaactaaacacaccgttccttgattttttggcaccaaattttgattcagattatttaaaagtaagacaagatatatcctatttttcattgtgaatctctctctatatattaatttcatcttaaacaaattttggcatgaaaatataaataaataaaatatgtaacaatcataattttaattttagttgagtataaaagtaagtcaaaatacttctgaattaagtatttaagctaacgattgaaactgaatcatttgtgagcttgaacaaaattgaattcaaactaaaaaatataaggttcatatataattcaagtcaaacttctagctaaattgattcttgtaaagtaaaatcaaactaaactaagttccacttggctcaatttatttacatctctacttaaaattcatttctttttcaacttcaacaagctcaaatatgaataattatgagaaactgcagagttaaacaaaaatcaaactcaaaatctaagctaaaatgcaaaaagttcctctctatttcctttctctccattctatattattaagcttttgagaaataaatgttactatttataaaaaaattgcatcatttctattttttttaattttctatatcttatgaaatgaagggaatggagaaaaaaaatcaattcccaagctaaaataacctcatttaacaaaaaagctaaattaacccgtaccaatatttcaatgtcgtgcaatagtgaaaagaacaaaaaggaaaaaaaatatcttcctctagaaaaaagcgtctccttttctcgtgtaggtgttttgaaaatcgaagccaaatctttatcttatctttaatcttaataagtcataagnnnnnnnnnnnnnnnnnnnnnnnnnnnnnnnnnnnnnnnnnnnnnnnnnnnnnnnnnnnnnnnnnnnnnnnnnnnnnnnnnnnnnnnnnnnnnnnnnnnnnnnnnnnnnnnnnnnnnnnnnnnnnnnnnnnnnnnnnnnnnnnnnnnnnnnnnnnnnnnnnnnnnnnnnnnnnnnnnnnnnnnnnnnnnnnnnnnnnnnnnnnnnnnnnnnnnnnnnnnnnnnnnnnnnnnnnnnnnnnnnnnnnnnnnnnnnnnnnnnnnnnnnnnnnnnnnnnnnnnnnnnnnnnnnnnnnnnnnnnnnnnnnnnnnnnnnnnnnnnnnnnnnnnnnnnnnnnnnnnnnnnnnnnnnnnnnnnnnnnnnnnnnnnnnnnnnnnnnnnnnnnnnnnnnnnnnnnnnnnnnnnnnnnnnnnnnnnnnnnnnnnnnnnnnnnnnnnnnnnnnnnnnnnnnnnnnnnnnnnnnnnnnnnnnnnnnnnnnnnnnnnnnnnnnnnnnnnnnnnnnnnnnnnnnnnnnnnnnnnnnnnnnnnnnnnnnnnnnnnnnnnnnnnnnnnnnnnnnnnnnnnnnnnnnnnnnnnnnnnnnnnnnnnnnnnnactttattttgatttggttaagaatatttttaagatataatataagattaataatactatgcacaatataaaaaataatttaaactagaaaatctacttaaaataattctataaataaaaattacaagagtttaaaattaattaaaaacaaaatcataattatcccataatatatttttatcaataaagtaaattaaaatttatattaaaaatatcatataaacattcccaagaatcatgaatatataaaatcaacttttctaataatcataatttttggatataaaaaatttctcatatcaaacatgcttactgaaaatcttggtgagatgtaagaactgaaggtaatcttcagttaaaacaattcaatatttttaaggtgttaccatgtagattcgctgtactacatcttcattggcaaaagtaaaataattattaccaaagatatgactaaaccacctttccctacaaaaattccacatgattaaagttttttgctacgttttgtgatacaagatgatatctggctaattacattattccatataaatgatgaaaaccattaagttctcgtctcagttaatagcaatggcattcccaggtcaacatcccctccagaaatcaaacacagaagattgattgctaccatccatgtgtgtgaaatgaatgccagaaggggacatgaatggataacgagctaatcaaacatgggctcaggattctgacaagatattgaattagacaacatggctgtgtacaggttgctcaaagatttgcccacaaaaactgcaacatatccttctttgaggtgattgggggcaaaataattcttagtgataatatggagctgttggccaggcgtaggcttggaaaggactgataaacccctaaccgttggactatgtataattttttctcctacctacatggctacatgcacttcaaaccatgcactctacttcttaggatactcaaaaacaaggccttctgctacacttcttgctcttccatcaccaaatagcttgctcacaatggccaatgcaaaatccgttacagtggcaagtccctcactagtgatcaatttgccatcaataactactttagcaccatttatttcttcatctttaagcttgactaagacggaggaatgagctgtggccctcttgtcctgttagagtaaaaaatttctcactttagagaggctttccttaagaattggaacaggaagcagaaagataacagaagggcgtcaaatacctttagtaagccctgtttttgtagaatggcaagtgaagagcagactgccccatatatcctttcagctgaattttgttctttaagaagcttcttcagaattctagatttgcttagtctttgagcaccagcagttcccccctaaaagttcatgaaaatctcagcaacaacaaataataggtgggacaaaaacaagaatcgtatggttatcataaactatttatatcgtgtcaattacaactgcaatgaaaaatcctacaatttgaaggaaccccaagagatataataataatagcacaagatatgattggtaaaaattaaaaatagggattgatttgattttgaaattcactcaagtttggttggatttgagtggcctttatttaattttagttttgagggcttatattgataatatacctttatttgtaaacccactctacctattcttatcaaggataagaaagtgagtgttaaaagaaaatgaattccattcaattttaaggtgttccaaacataaaaattaatttactaagcaattcaaatcctattttctacaatgggttataaacatgagaatcaatttccacatcaaatcaaatttgaatgattcaaaacacaacaatttatacttgtaaggtctgctatagcaccatgaaaaaatgcagcaacttatttattttgagaatttatcttactggaagaataatcagatcatatgctgactcttgagcatcaccaattaatatatcagcaactattttggttccttgagaagccaaaacttcaagagatttttcaactgaagcaactatgaccttagcttttgctcgccttagaatatctaccacagtcactacttcaatctcttcagagccatgtgcaattggtacaaggacctggacatcataatgtaagagttcaagtgtaaagatcattgatgcagaaggatgggcagctgaaatcttcccaatatacaaatttgatggtaagttagtaacttacactaggggtgtggtggccaacagaccattcaactttattgaactccttcttagctgcattatcatcatccgttctcatcaactattataaacaaaaaagagtacttgatcaggcacataactgataaggtaatatacataaaaaatcagaaagaacaatgaagatgttaatttttataaatgtaatcaaactaaagaatccaaattttaaaacatatatttcatgcacactcatcattcagcattttttttccttctcttttctcttcctctctgttaatctttttttattattattttaaacttttccacccctaggttaatgtatttgggtttagtaaatgtgttaaatgggatcaaacataacacatgggttttgttttttgatacattttaaaaatataatagaattagtggtacattttggctccactaaaatagttggaacttggaacccaggagaacaaaacataatagtattttgcgctctagctgcacgccaaatattaccttggttaaaaacttaaaattccccagttcaactagatcagtatctaatagcagttaaatatttgactattgaacctgctaaaagtttgctactggtgtatcatagggtttacaattttaacacccgaatatttggcaatacagaacaactgaatcctattataatgctctcttcaagtgattactaaatttgtattaccttttaattttaacacacgaatatttggcaatacagaacaactgaatcctattataatgctctctacaagtgattactaattcaatatcagctaccattacttttcagcactgtatcagccagtaaagaaagaaaaagaaaacaaaccactgcctacaagcacataatttgattacatagaaaaagggaaacaatctattcctttccagtaagaaagttactaacaaaacagtttaccatcaattctgcaacctccttggcaacagactccccaaatagctgctcggccaaggacaaagcaaactggtaactagttccaggcccccggctggttgtgagtcctctggaaacctggagatttgatttaacagcccaaaatcttggaagcctgtcgtagaatgcgggatggcaagttatcttgcatgacaaactagagcatattagccttatccaaatatatacaaaaaacaacaaaatataactctagcctaaattacagtctgtaactgcagttacagaagtaaaaatactatttaaaaaaaaaatacacaaatactataaaggttttttcaataatgtacgaatatacttactctaaaagtcagatccaatatgatttctaattagttaacagtataaaaatctttacactgaacatgtatgaaaattaaactcttttaaataaataaacaatacacaatgtatgtcattcaatcacaaattgtcatatatgataaattcgttgacttctataatagaataatatatgttctaaggttttgtaaagttttatgcaatcacaaatcattatctatggtaagtttattaacttttataatgataagtcatattaacaatggttcattattggttaaggcgggattcagcatttttaaaccacagaacattcggtttccattttcattgcaggtgtactcaacccacttaactagatagagactgcaaagtaatcaactagtgcatgcctattaaactttttataataacttctttagaatcatagcaaagacgatttctgactagttgacaatgtaaaaacttttagatgatagcacatgccaattaaactctttttatatttccacaactaattgcgtgcttagaaacccattgaaaagcaagaaattgctttcgggatgcagaaactataactattagcttcttaaaatcacataaaaacttagaaaatcacatctgaaacgtggaaccaaacacgctgtacaacaagaattttgataggcatcacccaacagttaccccaactgcaatacaaaatcattgtaacaaatattacttccataaaacccaagttaatcaaagcaccttctttttcttcaaaagcccccatggcaaaagggtgacagcaggagcagcacaaatagcaccgtagagcctattttcctcagcttgtctgcacgtgatttttcgcagcacatcgcaatcccgtagtcttgcagagccaggcattcctccctgtcgcttaaagttaatactatgaacaacaaaataatagtaaaacattgctatgagaagaaaataaaagataagttttttcgtaagttacacataaattaatttgtagaaactctctcacgtgagttctgtaaaaatgatttttaagtttacggaaaaactcattttatttttttcttctcctaaaaatattaagcttaccctctcaaaaaaatcttaagcctatccaaaacaatttcagttagagaactaacgggcaatgcaacgagatcaaaaacttcatccaaacacgcggtaatgtcggtgtcagcgaccagtttggtgcctccggcggcttcgacttggagctggggctccacggaggcgacggtgacctcagcgccggcgcagcgcagaacgtgaattaaaataacagcttccatttcttctgtgcccaaaccgatggggaccaggaccttcttgggagtgattgcattattgggagctgttgttgttggggcagagatggagagtgcggttttcggagtgagcgttctcagccgccgaggcgtgacggcggcggaggaggagaaggtgaccggagagaggtatgtggaaggttgaggcagtagcagcagcaacgacatggattggatttgagtctcttgctgcaactcactcttcgctctctgattcggaccaaatcttcaatgcttgtgttagtaaattagtgactcatcctatcttccatttttcttttccttcatttggataatgatctccttttactcatcctagcttcttgaaaacacttattttaagaagtgtttttgtttacaattatttttttagtttaaacaaatttaccctttatataattaaataatcattcaatcacatactgctatatataattagcatgttgattttataataattaatttaaaagttatacctattataatttttttattgatattatattaatttgtataaaagttaatcacaagttaaaatagttttaatttgtattttttcttaaaaatcgattcaaataaattgaaaagatacattaacattctttcaccactccaacacaaggtttgatgtaactagcaaaatagatctttcgtcattgcataaatgcatttttgttatgaatattgtcatacaaattgtcaattgataatgtagatggttatgttcgaattgatgaaattattataccataatgcttaaagaatgtataagaggtatcaacccaaaatttgtaatttgtaaaggttattttactcgagatgatcatgataaatcacaattatgctcaaagtagttctatcacatgacttgtagatttaacatgcacttttttgtaatacatgtgcaaataatgacattaatgtttcaaatcaacctaatttgtttaatgacgtttttttaataagaacaagctccaagagtgcaatgtaaagtgaatgaaacccaatatattatagattctatatagcatatgaaatatatcatgagataaactatgtttgtcaagactatctcaatgctactaggagataagtgaaaattattcacctaatgacaagaatcaactaaaaagcatgtcgactagacttttggcgtcttttaagctttattcacatatatacatgatcgcttgacacatggatacattaaatgataaaatatttgcatacactataaaacgtaatatgattgttgaaaatgaatgacactcatataatgataattttaataatttttatgattatttagacaatggcatgtcaaccattgaagtatctaatgatccttgttctaatttcgaaacatatataggatacactgtcaaaagaaatttcatcaacaatttctaacaaatttggtaaaacacatttgagaatgttttgagaaaatgaaatacacaaattatgctttaagaatatatattttactgtatttattatttcaaaattgaaatacaaatcaattattatttttaaacaaaaatatataaatataaaattataaatatgtgaaataacataagttcctagttaacttattcttgaataaaaaattgataaaattcttaaaattgatgtaacaattcgaagctaagaaaaagcaacttaatgataaagtttatttgtcattgtggatgttgtaaattgtaataagatttatttattcattaaaaacattatgatagtattttgttaaagaatttaaattacttttattacttaaattttcacaaaatttcatttgattgtaaaaaatattaaaagccttattcttatatagtcaaagagacgtggcaagattatccgatagagacatcaaatgtatttattttgcagtaacggaagagagtggaactgtatccccgtcatcggataaacacaatagctgtagatagagaagagtgccattattgattcgcagaagaagataagcgatgtttgggttaatcggaagaaaggcctatttgttgggaggatcaggaacaagaagaaggtggttgagcttcgcatcagcagcaacaaccactaccaatggtggggccatggaggagttgctttcgcagctccaatctcatgtccaaaaggctcttgctggtggaggaccggaggcagtgaagaggaacatgagtaggtacaagtttcttccccgtgaaagaatcgatcgcctccttgatcccggttcttccttcctcgagctttcacaggttttaattcttctttccaaacctacttaaatttttaatcttttgtttatcgcttgagaaataaaaagaatgtcatgtttgaatagagttctcaataaacacttttggaggagagaaataaataagaaggaaaaatgaattaacttctcacgtaaactaaaattagtttatgcataaattagaaatcacctttttgtgaagctaaacgaagagagtttctacgaattaacttatacataacttatgagagaagttaattcacttttccttctcgttttcttctcttagaagtacttacagataagtttatccaaacataacttaattagtatattaaattatgattttttcggttaatttattttttaaatttataatgatatcactttagattactgttgaactctagtaccgggaggtttacaaaagctcacgatcacttatgtttgcaaactttaatccgaaatgcagttagtcttggagataggtgggatcgggaattatgagaaatgggtatgtgggtttgactaggaaagcttctaacttttgagtaataaagcttgcaggacatcacttgtatgaagaacctttgccttctggaggggttgttactgggataggtcctgtgcatgggcgactatgtatgtttgtggcgaatgatcccactgttaagggaggtacttattatcccattactgttaagaagcacctcagggcgcaggagattgctgctcagtgcaaattgccttgtgtatatcttgtcgatagtggaggagcttttcttcccaagcaagctgaagtgtttccggacagagagaactttggcagaatattctacaatcaggctgtaatgtccgctcaaggaattcctcaaattgcattggtgttggggtcttgcactgctggtggcgcttatattcctgctatggctgatgaaagtgtgatggtcaagggaaatggcaccatttttttagcagggccacctcttgttaaggtttgctctagctactcttgtgctctaaaatgttgtgtgataatctctggctatttctatgttcttgaattttataatatgtttcttttaaatttcaatattttaacactaacaatgtgttgatgtattttttatgcatttatgaccaaaattaaaccttaattaaatgattttttaggctgccactggagaagaagtctcagcagaggatttgggaggtgcaactgtgcactgcaagacatcaggggtttctgattattttgctcaaggtatttgccgtggattctttctcttgcacacatctgagtgtatagaaaatgtgataactaatgacatcaacttagttcctatttgtgactttgtacatgttttgtttcttgtagatgaactccatgcacttgcgcttgggaggaatataattaagaatttgcatatggctgggaaagatgtcttggcaaatggattgcagaatataaattatgaatataaagagccattgtatgatgtcaatgaacttcgttctattgcccccactgatcttaagcaacagtttgatattcgatcagttattgatcgcattgttgatggaagtgaatttgatgaattcaagaaattgtatggcactgtgaggacatatccactttacttttttatctgtttaaccattatcttgatatcaatgggttgctatggaatgaccttttatctctcggcacctgtacacttgatgatttgccgcacacttattggttgttgatttgacaataagtatttggcgcccatcatctatatgcaacaaccaataaaatttctacaactcatcaatataccagtagcctggaagaaaaacgcagttgcaattccctatctgtttattataacctttttttttaaaatctttttgcagacacttgtgacaggatttgctagaattttcggacagcctgttggaattattggaaacaatgggattttattcaatgaatctgcactgaaaggggcccatttcattgaattatgcactcaacgtaacattcccttggtcttccttcagaacatcgctggattcatggtatgaatttaacttatttcttagttactctgattactatgctttgtgtcattatattctaacttctgagtagattgattcctctttccttcagaacatcagtagatttgtggtatgagttatcttattatattcattgtttactcattgaaacacgaagaattatcttaatatgctccatgattacaaaaataaatgagttgtataatctataagcaatcaggcattaaagtctggtgggtttgagaatcgtcaattgacattcaacataaatataacaatgtagatttaaggaaatacaggggaattggtgacactgtaagactaagtaaagtcaggagagtttgagaatcatcaattgaaattcaatagaaatataatgagtttgagaatgcatataagatctcaaagcagtattgatccttcttattttggttgtgaaggggctgtctagtctcaaacctgtggccattgatggtattgcaataagcaaaccattagaccaggttgaagacagactattgatccatcttgttaccgtcttttagtggtgatcctatttttaactttaattatagtcctgttttgtcttaaacattcttgttgatagatatcatgtatttttaacagtggtactattctttatcaaatggtgtgtgtctgtaggcatccaggttagtttatggtgtggatgtcaaatacttcatgtcatccatcttcttttgtctaattatattttgttgtctggaaattgtaaaatgctgaaggaaagtatttactcttagtttgtttctcttcttttccaaatcaagaattgttaaacctaaatattctttctctaaacaattgagtaatgaaactgttatacttgtctctttggtaggttggctcaagatctgaggcaaatggcatagcaaagtctggtgcaaaaatggtgatggctgtttcttgtgcaaaggtttgtggttccagccatgtacttgcaagttataacttattctttactctttagctgtgaataaacttaacaactacaaaggcagagtaagtttatctacttgtaattataagtgtcttggaagttggaatgtgattcaatttgggcaagtaggttttcctgcatgaaagaaataattagagaaggtgcgatattgattaatacttacactgatttttttaataaataaatatttggtggtttatgtctttcatctttacgattgtagttgtattgagtcaaattcaaagactagacaatataggagaaaacgacagatggttctaagtatgcttgtagagtaatggtgattctcaaaacatgagagatatttttcaagggaaaataataattcttcttcaaataaaacacgtgcaggtacctaaagtcactataatggttggaggaagctttggtgcaggaaactatgcaatgtgtggtcgtgcctatagtcccaatttcttgttcctttggcctaatgctagaatatctgtgatgggtggtgctcaggtaatatatatctcatcactcatgagttatgattctttacaagaaagagaaatttttggcattgattgttccagaacattgatttgcgtggttattgttctgtactttatttgtgagatacatcattatatagcatgcatgttttgcatgttctctccattctaaatcaaactggatttaaacatttgattggtcattagtttgatattcatctggtttgtgggggttctaaatatattcctttggaatgtgatcataaggctgctggtgtgctggcccaaatagagaaaggcaacaagaaaaggcaaggaattcaggtaaactatatttggagaaaattttttgttttttttttctcgcttgttgataacatatttgtggtttcctcatctgtttttgcttgtctccatgtgcattatacttgtaatatagtggagcaaggaagaagaggatgagtttaaagggaaagtagtggaggcttatgagagagaagcaagtccttattactcaacagcaaggctttgggatgatggaatcattgatccagcggatacaagaaaagtcattggtctatccatctctgcctccttgaaccgtgacattgaaaacacaaaatatggtgtatttagaatgtaaatttcaaaatttattctgccctaaactatggggttatctactgttattaagaagaataaaaaaagaggaaaaaaggtgtgcgcattgttgaaatgaagggcaagacaacgatacgaaagggaacaagctgagtggtgcaccatatatttttataataaaaatgtttcttgcaggtcactttgtattcacaacaaaatcttgcatgcagattcgttccaaagcaaactcggtgtgtaagaattggaacaatagcacacaaaataaaatgccattttacttaattttgcaagttattaaatagaaagcaggggatgtcacactctgttttctaaaatttataatctcgccaaataatattataatactatgatttctagctttctacaaccaactcccaaataaaaacaacttaatattaatatagtcatttagacattatacatattattaagcttctctacgtaaacatttttaccaataaataaataaaaaaaaggcaatttaaaaaaaaatacgaaaaacattaatttcatgtagtttgctcaactaatttacacaatgcagtaaaaatatataaaatatcgtatgccacggatcatctaacaagttggcattgagtgaagtgttttgggagcaatttctcagtcattattcagctatactcagccaaatccaagggcttgaaatattttccatctataagataagttccaattgttagccgcactgcccacacatctttgggttttcttgaaacaatcctgcagcaagtaataacccaattgccattataagcatttgatgctcacagatttagaattcagagttaaacaaatagtagtaaattaaactaacctttcggacctcaatggtttaaatttacatgaacttatcagattaatttctatgcactatcgttgtaagaaaatttatactgtcggtcaaaccctaaatatgactttaaaggtaattttaatttataaaaatcaataaatttagcagtttgtaattggatttacactgttaatagatatgagaaaatagtaaatgtactgataatataaataaataatgtatactcgtcgtatatagtaatttcattgacctttacaaaagttacttaaaatttatacctaccatgatttttaatttattgacaatgtaaaaacctactacactatataaaaaataaactcaaatagtatttggatatacttttagactttactgaatcaattagtattagttccaagaattaaattgacacaatatttggagaattgaattttcctatcaagagataagtggatgatgaggtgaaaaaataccttccaacatcaccaggtttgactaggccagaattgaccctgaggcagggcatagtagctgcagtcttgatcatcttgggagcttcaatgaaaataatgggtgaccctatctccaacttggaacgttcttctggcaactctgatgatgactcttttgattcacactttacaacaacattttttggtctctgaagttcacagttcatgctgcttctatcttggaccctcaaaaatggctttgtgattgcataagaaagggacaaagccatggtatgctcactttttttgtagtccttcaaacactgcaaaatttattaatggctttttttaaaaattctgcctcaacaatcaacacctcatccttttcaaactaaaaaagttgaacctactagagattagaagagtcataaaacaaacagcagaaatttgcactctaattataaaagtctagggttttaaatattgatcgcggtcgcatttcggttttattgcgttcactgatatcgcggcaattaaaatgcgacagatcctaattgaggtcatgagcaattaaatttttttaatctttttctaaaacctaacagagaaacaatttagaaaaccaatgcttccgcgtaaatatttgcttgccaatgtcccattctaagtaaccaatttcagtaaaaaaaactgttgagaacacaaacaagtaagcaaccacacgccaccgtttcgcggatccgcaacacgaatttctttctccgcgacagaaacgcaaacgcgaagaaccggaaaaaaacacgttcgcgctaataataataaatatagagggaaacaaagagtcctccaaaatagaaggcgaagaaaagaaagagagagagagagagtaaccggttgttgtagcgtggactcaccggaagtggtggtgatcggcgccggtggcggtgctggaagttatggtacagacgtacagtgcgatggttttcactgtttttcagtttatttgttactgcaagatcagaattgaatggatgatgttgttcagtcgcaaatacaatgagagggattttatgggagcaatttgttttaggttatgataaaactttaagatcatcgtttcaagaagcgcccatggcctaatggataaggcgcttgacttctaatcaagcgattgtgggttcgagtcccactgggcgtgttttaaattgtgttataactttttaatatcagctttgcttaacaagttgtaaacttgtaattgactaacagaaaataatttcaactatatatttttttcttcaaatgatttaacttaatattttatcttttttcggtatacatttttaatatctttagttctaatttaagtatcaatgttttaaatagaattaacaatatatcacaatataaattatttatcataaatataaaatataatatataagtacaaaattatttatttattacatattttaattatgatataatttatacatttagaaagtagtaataattttttattataaattttatttgtataaaataaacattattttatgcaaatgtatatgcaaaaacactagtacttttgtattttaaaaaagtagaaaacacattacacatcaacctttcactttgcatattttaaattataaatatattttttagattatcatattattggtacaaatatcaataaatttaattgagttggttgaataggtgtatgaatattataaatttttaaaatgttataaaaaaatattattattacataatattattgattttattaacgattaattttcatttaaaaaactaattgatcatcagatttattttttcaatcattttttttccattaataagatttaaatagagactttgcttaagataaaaaatatgcggaggaaacagaagttattatgacttagaagtgcatcatcatgtaattacaattaaaatactagtacatgtgcaataaatgaatataatttgatactactagtattttgatttgatataagacaaatatagcaacatagttattaaacatttggacaatagaaattggagacagtggtcaaaagaccacatttttttatattatttgtcattctaccacagggagccaaaattttgtcaaattgccacggtggcaatttcgcaggaagactgggcgaatataggaggccacacgtcagccatgcaggacgctatgggggcgggcagctgacagacgtaattcgcctcccctggtagcgaattacgtgctgaggaggtgcagatcgcaggagctggcagcggactattggctccctaatttggttaaggggtctgcgaattaggtactgcagccccactatttaaaccttgccggccatgaaccttcgtccctttcaaatatcattttccagcctctcgttgtctccattttggttgcatatcttccagttcaggtaagttaataatttttgtgtttttttttatatgttaaatattaaattgattttttagttaaataaagttagatattaaatgaaagttaaattaaaaatgtaaaatattaaattctgagaattattttaaatattagattagataatttttagtatttgtttataattattaggttagtttattattatttttgttttattttgttgatattttaaatattgtatgtattttgtatttaaatagagttagacattaaatgatatttaggttgaagatgtaaaatattagattannnnnnnnnnnnnnnnnnnnnnnnnnnnnnnnnnnnnnnnnnnnnnnnnnnnnnnnnnnnnnnnnnnnnnnnnnnnnnnnnnnnnnnnnnnnnnnnnnnnnnnnnnnnnnnnnnnnnnnnnnnnnnnnnnnnnnnnnnnnnnnnnnnnnnnnnnnnnnnnnnnnnnnnnnnnnnnnnnnnnnnnnnnnnnnnnnnnnnnnnnnnnnnnnnnnnnnnnnnnnnnnnnnnnnnnnnnnnnnnnnnnnnnnnnnnnnnnnnnnnnnnnnnnnnnnnnnnnnnnnnnnnnnnnnnnnnnnnnnnnnnnnnnnnnnnnnnnnnnnnnnnnnnataatgtgtatatgaaatatttaaatgaagattttatttaataaaaataataagtaaaaaaattgtttatttgaagatttcatttaataagaattataattaaatatttaatttaataaaaaaatatttgaagatataataaaattaatatgtaccgatgtaataaaaataacaatttaataattaaagattaaaataaaaatatcataaataaattataataattttagatttgatgtaataaataaagtaagtaaagaattaatttaataaaaataattattaaaaaattaaaaatacgttgttaaatatatgatgtagttaaaagtttaattaaaggtttgatttgataaatacaaaaaatataaattaataataataagaagttaagattaaataaataaagatttcataattaaagataagatggcctaataaaattgtaattaaatatttgaatggaatctgttgttgaaattgttgagcgaaacatgactttatccgcattccctaataaagacatcaatttatatgtaggtattttataaattatgaaattagttaaaattagtataatgtacaccctgttgatacgattatgtttaaaaaatgatgaagaattaatttaattatttttataaaaagtataataaaaataaagattaaaaatttaaaaattaataattaattatataatgtagttaatatcataattaaagtataataatgtaaggatggtgaaggtgaaggacttgagcgaacgacggatacggaaggaagacggagcgaaaagtgtttacggtgaattaatcgggggaaaatatttcgaggctggcgaggaattttgggggttggggttttagggatgagggtaaagcgtcatgtcccaacactcacaaatagaacttagtcaagacccatgccacattttgaagtaccaaaagttgtgactttccgtaaaatccgaacacccaaaattcctcgccagactcgaataatgctcctcagatttcttctccataacacatgttcgtctgtcttccttccgtacccgttctcatgctgaagccgttgatgttgaccagcctttaacaatttcaacaacgtaggtttaattaaaacattgacaacgcgttaatatatcgactattttttatatcaatgtacattattaatggaatttattttttaaacaactggcatacagtcatggatcacgatgaacatgttgcgtccacctcgtcttctgagtcatcagtgagtgtgatcgacccaggtccatccgtgcgtagtctcctcacactacaggagaggcatatttcgacttatgtctggaattcccaggctgatccatcgatgcgggatcgcgttattaaggttaggatcgctgcgacacatgatcaccagggtatacctgacgagatccagccatggcttcaacaggcaggattttatcacattgcgcgcttgcgcaatcacgaggtcaatatatgaacacaactgttaagtatgcaatttgatgtttccaacgtatggtaatgtatttaaaatttgtttcgtataattctttgttcagatcgatcatcaccttgtgtctgcgcttattgaacgttggcgtccggagacgcgtacatttcatatgccgatgggtgaggtaacaatcacgctagaggatgtccatcatcttttggggttacccaccgacggtcatgttgtgtctggccgtcacggacgacacaacttgcgtgccgttattggtgatttattagggcttgagccacctgctggtcggcatttgcatggcggtttgttgggacttcattatttacgggaccagtttggtgattatgcgatccatgtcggcactgaagtaggacgtcgaagatacacacgtgcgttgatattacgtatcttaggcggtatgttatttgttgacacggcttcgagctttgtccccgctcgatacttgttacatctggatgatttccaacgcactggaacattcagttggggctctgcggttcttgcatacttgtatagggaattgtgcaaggcaactcgtccatctcgtcgtgagatgggtggatgtgctttgttgttgcagctgtgggtttggacgcggttccccacgatttctcctcagcttccccctttgcaggatcaacacgacttggaccatcagatctacggtcataggtattgtctggttttgtatggtagatcgtaaaacaatgtattctattatggttgtatatgattaatgatagacaattttcttacaggtttaacgtatacacgacgcgtcaaacagtttttacaaacattcatcgatatcgtcatcatattgatgtcatgcgccgtcgaaacatacgttggaggccgtacgacattgttgacattgtccatccaccggaggttgacgtggctcgtagatggttagcggtttgtccgcttatttgttatgaggttgttgtatatcaacaacctgatagagtactacgtcagtttggatttgatcagcatattccggatgatcctatagactgtagtgtgctcctgacgatcaccgtgaccggtaagaccgaagtcgattggactcagcggcacgcagtttacatttcgcaatgggcatcatgagatgccctggttgtgcagaatactcagcctatgcgcagagatggctacctatcggtgaacagtgagtacatgcagtggtattactctgtcacccgtcggtggatgacacgcagagctgcattacatgcccatgtggtacgtattttcacagtttttggtgttgttgttgttgttaatgtaatttctaattgacttgttatacatcatgtacaggcggatcgagtcgagacggttgttcacatggcctcccctgaggctcaggggtcatttaacatgaccagatctatgacgaggcggttcgagcattgtccgcatgcgatgatgttgaaagattaacagatgctgaagatgtggcgccaccacccgtacttcgtaatacagaggcgcctcctccagttgttcaccgaaaccgccgtgcacgccacgagggattaccgttacaccacagtactcccccagttgcagacacacctgttgtggtaccgcctcttcctccacgtccttctggcttgttcttcgcacctgggtacccagcgggaccttctcaacaatattggtggccaccgcatcaggttcctgggacacaatatccgccatggtttcacgctccatcgatgcagcagggtggattcgcatattcacatccgatgtatgcagctgggcctaattgtgctgcttctacttcagctggtccgagttcacctgctcctagttatggcaattgttataggcctagtgctccagtgccacatgacgatgtagcgatgtctaccccattggcagagccgcatgtggatccatattcccccagttttgcatcgtacatgacggaggagatactatccgccatgaatgacggagatcaggccgacgatgacgatggtgatggtgctgctgatcctatcattcgacgaaatccggtgagggaagcacgatttcgatgtcatatgtctccatacgagcacgacatccgtcgttgtagaggatatcacgaagaccgtcaccagcatcactgagttatttttatttacctgttctaaattaaagtatttgtaatatgttgttgtgtttagacattgccatgattgtaaaatttgaaccgtattttagtttaacgttcattgcatgctaacttccataaatcttaattttatttgcgatgtttattgtttaatttctagctagtacatgacgacaatcaataactacttcattgcggttggttgacagatgggcaattacgcctattgtgacccacaactttacaataaccacatctggtacgagttgttgccccttcacgcgaatccatctcgttgcgtatgcgcgtagtatttggtcttccttttttccttttcagcatgacatctggtatgacaatcggtggtgaagctggtggtatgaagtcctcattttcaattggataccactgtggtgcatacacttgacattgatacgcggcactatatacaaggtcaacatattgcctgggatcgtggtgtgttgatcgacaagctgcaattacatgactacacgggaacctataggcagtgaactcaccacattgacaatttcgttcagctaaggacaccgaccatttcttcccgccagtatgagtgcgaatgttgtaggtctcttgaacctcaaatctcgtcctaactgaatcaaaacaagtgacgtagtgcgttgccgattgttcaaccacccttgtatatttttgtcatgctaccttcgagaaatgattacctcttgccatctcctcacgagcctcttgaccatgtgccacaaagtatgctactaaacgagtgtatgtgaagcgcacaagggacgtaatatgaaggcttctggctcctttgagcaccttgttaaagcacttagaaagattggttgtcatgtgaccaaaccttcttccgtcttcatcatatgctatactccacttctccttcgggatattatcaatccatgctgctatttgagggcttgagtctttaaatgtttccagtccagcatcaaaatctaaccgcgaggttgtataggctgcaaaaaaaaaaaaagacaatgtcatagctagtgaacttcaacggagtaattccatataataacactggcgtacatatcggacaaacatacctaattttttcaattgtttcttgaggacgacattgctaaacttgtgattaaaattactggccaggtgacgaatgcaataaacatggtacgcccgtggtggatgccagcccaaatcaacattgtttacagcggcaattatgcctgcatgcctgtctgaaataaggcaaatgccgtctttttgagtaacgtgaatgcgaagcagtgccaaaaaccatgtccaattgtcaatattctctctcgaaacaatcgcaaatgcaattggaaggacataattatttccgtcaactgatgttgcgataagcagtgttccttgatatttcccatataaatgggttccgtcgatgcttataactggtttgcaataattaaaagcatcgcaacactgtttgaaagtccagaacaccctgttaaacaccttagcacttccgtcaagtatgccatcaatgaaatggtcatgcaaatccagcttgtatgcagacccaggagcaaaatttaacatgtatcccaaccaccttggcaaaaatgcatacgactcatcccaatctccgaaaaccttcacaatggccttttgttttgccttccaggccttcgtgtatgatatatggaatccgagcattgatgctatcctttcttgaattaacccaattttaacactgggatcctctctaatcatttctgcatttcgtcatagaattatacattatctaattataaacaataatcaaacttcaatgtaatgtattttacgtacctaagatcatcgaacatatcaaatttgaatcaagttgattgtgatcttgagaaagattctgaccaacgcatgtgtgttcgnnnnnnnnnnttcgttattccatatgcctacaacccattccgtgccaccctttttttgatatgccctcatcctccacggacaaccatcataatgattttcacaaaccattataagtcttttcgtatcacttttttcaactacggcagtgcgatgatcactcatacaatattgttttatagccaattgcacatcccgcttggtctcaaacacctgattcttatataattgttgacccatctgccagttaggaatttgtcctccttccatatcaccagactcctggtctgggtatgcccaattaatatgtgtgtaatgccttacgtcagaccaaaaaggaacaatgtcgtttcctaaatcattagacatattaatcctcacctttctattaaacctacaataatttctattaaatctacaataatttaataactactgcataacaaaaaatagtgcatccataccttgttgaccctgcattgggtcttgcattccaacattgtccggagaaggaattgcaaaaccacgctcgaagtcaccgtctacgtccgtgtctgtcgagtcatcgtctggaacaacaccttcgtccacctcgtcctcggaactgtccataggccaaattgggtcgtgggccggcacaatttcattcgtcattggttgacttgctggtgctagtgagggagatatatgcatatcttcataatccatttcctgtgttggttgagtttgtattggtggtgattgggatacatctatgtcttccggattcaccgacggctctctatttatgtcaatatttctgttcgcctggacacagtgttgactgcttgattgtcccccaatgtttaattctgcatataattcgataaatcttgggtttgttccgtccgatatgcaagcgtctgcaactaatgctacatcgtcatcatctacaatatccacagcaacccattgcaccgggttccccgatgcacatctagcagtcaatcgagagacagattgtccacgttgtaatctcaacattttgtaaatcactttcatcaaatcgcgataactgcatcctgggggcattcgaaacatcttactttccccttcaaaaacttcaccatttggcccaacatatctacgcccattaaaatacacaatggttattaaaccatttctattatcactcatattcgataaattaaaaaaactaacaacaaaaatattttcaataacacaattatgaaaccttgcaaaattcacacataaggaatgtcggatggtgggagatatagaactaagttcgctgaggatgtggccaatttatagtgtcaaattcgtgtgtaatttgcagcccaggtaagcaaactacagtacctaattcgcctgtcagtctaccaaattacaggcattgtgccacgtgtcacattcgtgtgaaattcgttggccacgtaagcaaaatatggtacataattcgtctgaccctctaccaaattaggtgcccaaccaaaaaatgccacgtgtactgcccgacgaatcagattcgggcatcacctaattcgcaggatgtctcagcgaatttggtgtccaacccaagctcgacacgtggcaaaaacgcagccaactcagcggtccaagttcgcccaagtggatagcaaatttaaagtcgtggcattttggcaatatatttggacgctgtggcatttggacaaaattttaccacaagtgtggcattttgacggaagtctctagaaattgttgagagtgggacaaaaaataatccaatcttgactgaaacaaaacttgagttgttagtagtcacaagcatccatccatccaccaacctttattgtttctgagttttcattttgctgttgttgcgtgcggtcccattctttgttttgcatttgtcttctttaacttgtcaccctctctctctctctctctctctctctctctaatggcttcattttctatcacctcctcgcctccaactcttcacaaagccaccatcaccgacccttcttcttcttcttcttcgcacgccttccctcaccgttctcccttcgttttgcgcatgccccaccaaccccatcgccctcaaacccctcttgttttgcccaagattcaatctttgcgccacgaaactagaggttttttctcttccctctttgcgcttctggggttttcttgttttaagctcttgagatcgaggccaagattgtgttttgtgtgttatagagcgcattcgtgatttattgatttggatttcaatctttcattggtaatgcttttcttgctgtggaattctggattgttattgatcgattgggtgctttgtcttttgtgttttggtgcctatgttggtaacatttgggagtgttttttgtttaatgtatttttctcctttaatccgtttacacttaaggtgtgttgtttgacgcttaactttcatactttttagcattttccagcttaggtttttaataaggtgtgtataatgtgttacctcgtgagtttagctaaatgatggatttggagtgactgaaaaaaaacaattttaggtggtgttttggtactcatttcaagtttgaagaaagaaactcaaacaatgtccttaaagtatttctgggaaggtttaattaaacctattgggaaaaaatgttagttctgtgaaacattggaaatgttgaaatgttcgttttggatcttcttaaaaataagaatatagttctcctttcgtattctcactcttattttttcagaatgaatgcatatgtcaaaaatgtccaaactactcataaagtataagttgcagtttgaatagattcattcttttgaattgtggttaagttttgcaaaacttttccttgttaatcatttgtgccccaaataacctgcagaggcatggaatgatggaaggattggcatgtaacatatggtttgttacctgtgattatcttacttccactagaaaacccagcatacaggacctgtcacaatgatgatttttgtaattacagatcagaagcattataaaccttagtatccttttgatctttttatccttgcttatttaaatttcaaaggaaattgtgtagcctagtttatcatccatcattgtattgattcctagtttgagttgctagcattactgtaataattgattttcttcttctcgtttttatgacttttaggccaatttgacaattttgaactgtcatatttgttgtctcatctgaagagcttgagaagttcatttgtccccccatgtttttcctcttctgatggctattttatcaataggcttgaatgcttgggctacctgatctcatttctgtataataagatatatttaaattgtttccttttcagactgctagtttgtttgaattaaatcatgatgatggaatagcctatgaaataagatacataatatcccctctgccacaaaaagaaaagaataagagtcaaccatgtagaaggcatctgaaatcatttgtgtttattaatgagtagaaagtttttcctctctatgtaactgtgttcctgactaaggagagaatttgtgttgaaatatttcactcagtgattcaaggctcatgcttttttgtttgtttatttcttacttttagctggtcttggtttcaatttcatcatttatgggatgccggtgtttattgtggcttgaatcaataggattgccctttaatcatgtggagttgttatttggcagctattccagttaccaaagacctgtgggataattcaattctgaaaagtgaaaccccagtccttgttatattctatgcaaattggtgcagcccgtgcaggatggttcaccggataatagatgagattgccacagagtatgctgggaaactcaagtgttttatggtcaacacagacactgacatgcaaattgctgaggactatgaaattaaggctgtaccagtggttttgatgtttaaaaatggcaagaaatgtgattctgtaattggtaccatgccgaaggagttttatgtggctgctatagagagggtgctcgagccctaatcatggatcagtgcaggcaaaacctcagcaacggggatggactttttgtccattttccgttaaattttctgttagtttgtctgactacgcagcattgctgagttgttgtacatattttgtttcctttttacccgtaataggcgtggccgagtgagactgcttctttcgtaatgaatgttccactttcaatcgccatatttcctttgaaaaatcttcttcagctacagagaatatcatagttgaaatttaagtgttcctttggtacttgattcgaacagttgttattcaggaggtaggatttgatttaccttcttgtgcttgtttcccttgttaagcaattgttccattttttgtgacctatgtccattgatcagcctagtgtgtctgactatatagtaatagctgtatataatcaaattcgcctgtttaattaagtaataacatgcatgtagagcctgtatccaatgctgaatatcatggtgctacaagagcagtaaagataaaaaatatcatgctgaagattacatatgttaacaaaaatacttaacataagtatatatatatatataaaaaaaaaaaagtcttcatagtttgctaagccttattcaacattgagtcggacttgtacttaaggtcttagattaagttctgatggaggataatttatgtatgtgttgatagcatggattccctaacattgaaattgaattagattaacttaaactaagctactcaagctgttgtgttaggcgtctcgagggaagccttaacaaattagtgtggaacttttgtatggtaaaaatatcaatgactagaattacgttagtggcaacaggcaatggtaaaaattatttcataaagcaagcttagtaacttgaaatattttttgtatggtgttgagaggtatatgaaagaaatgagtggaggacgacggaatatgtactttaacgtgggcattcttaacatggctaatgtataaaatataggatagcaagacactacacacatgaaagaatatttgtatgttctttcatatttagtattttgttacaaaataatctaaaaaaaacaagaaaataaagttatatctttcaataaaagatatatttatcttcttaaactaattttctatgtttttttctatgataatgagtctctaaaatatgaaggagttattttttaagagcatttctaatgctctcaacttaagattaccattttgagtatcttatgttatattaatttaaatgatcctaataatactacatcatattaaagtaacccatatataagaaaaatattgatttaacttttgagcatgcatcattgattttcaagtaattgaatgactatgccaatattttagaatcacctactgccagtttgatgttaatattaatcaatttcattaatcttagttttgcatggcacatttttatcctccgattcgaacattccatgctcaatgatcacttcacaaatctaaagtggcagcatggtttcaaacccataatctactattttattttatttcagtgtccaacgcctactttaaacataacctcacccatattatgttttgctaaataattttttgttgttcattttatatcagcatatttaaataaaacacgtgatgaattagagtacatgaactataactatggtaaaaattcaaaacctaaaactagaaaatagaaaagttaaaagaaaaatatcgagataattcatttaaattgtatcctcaattacacaagaacaataccctaaatagaaacaacaatatatcatctaattgaatgacaacctccaagtgttatcatctagcttctatgtagaaaagaaatagactagcaaaattactaatctaactctttctaatatttttacaaatgtttttgttttgtttttaataaaaaaaatgtcttcttttgcaactttctatcttattttttgacttttttttttattattctattatctatttattctatataggaagaaaaataacctttttattaactatcctattnnnnnnnnnnnnnnnnnnnnnnnnnnnnnnnnnnnnnnnnnnnnnnnnnnnnnntttctttattctttttttcactttttattattattattttaaaatagaaaaaatacttaaataaatgacggagtgaatacaagtacataacaaattaaagatattaagcataacaaacattttattctttaagaaaataaaagttatttttcaaataattaaaataacatagtctcatctaatgagatcctttaatcaattaaaatataatttatatgttaaaatatattcatttattatggattaaattataatatatttatattaaaaacatttatttattttaaattacaattatataaaaaaaacatttatnnnnnnnnnnatttatatgttaaaatatattcatttattatggattaaattataatatatttatattaaaaaacatttatttattttaaattacaattatataaaaaaacatttatcatatgcattccataggttaaaatactatttaaataatattttatgctaactttttctaaagtttagaaaatgactaacacactgctaacatttctaaagattaaaaaatgaactcatttttagccttgtggaaatgtgcttacatttgcacataccaaacctctaaatgaggattatttcttttaattgaagtattgtcatgaaaagatgaatccatataattaggaatcctttacatgtttaaacaaatatagtaagtttatccacgagatatctacttgtggttgaggtgatataatttgttgaaatattattccttgataaggtgaacttagataagttgtgaattcaaaaaacgatgttaaaaatgtagtatgtttaattataagatgattaggttattgttaatatgtttatgtgtacacgaggaattatatttgctatttgttgaagttgatgatatatgtgtttgtgaataaactttgatgttaaaactattttgtacatgtaaaaatgagttaacatggtccttttacaatattttaataatatgattgctttgggagggagttaaatgcaaaactttgatccactcgagtgacctagggaccttgcttagtgaatatcatcctaagtactcaccccctatgtctttaactttgattagtgtgtcagagtgacgaaattaaattattgatacgtgatgggtataaaagagggaaagtccactctataaaataaaaggagtagataagagtccaccacaattgagattaaaggctaagccaccctcccaaatgataaagaacccacttgtctcaccactaatccaaggttagataaagataacaagatttaagataagtttgagaacttgcaattcttaattttcatttatccaatctgaattctgcattacaaaatatcccctctttatagggtaactaaaagcatgagaatacaaagagacatataactccaagagttatgttgcttagaaaatagaaataacaataattaaacccaacttccaagagttatttaccactaaaatctctttaatgcactttaaatgttaaaactttaatcttccttcataattgactcattaagacaaccaactaagcataatttgacccaaaataacttctgaacccaactgaaattgtgccttgaagtcagagcatgaattttcaacttctctaatcaaatgtgacattctaacttttgtatcaattatgaaaggcttagttgactcattgaaatgtgcgagggatgagataattattggtgagatgtatttgaacccttaagtgaggccattagagatgacagatacaaagttattgtatctatagccgtaggggattccaaatatgatttgttgttggtatgttgtatgagcacaattagtgttgattatgggtaggcacataagttgatagtgtttggtgggatctcaacctaaaattaggagttttcatggtggctaacaagaatgaacttatagaatagatgagcatgtgaattcttatagatttaagatcgtgaagtccttacagaggtaagccaatacccaaatttgtctattttgatacaaccattttttctccatatgattagcttaggagactccctgaatggtcaaacataatgaccatggtaggggatgaaatctatggagaccatccatataatgtagaaaactccatggaatagagtctttgtggatgatgttgtctaacgtagatgtgatgatgataattgagactatgtcatgatgaattttgatgaagattttttatagttgatgtttaaatgtaaaacaagatgtatgatgtcttatggtgattagttggtgattgaactagaatgttgttgtctttttgtgtttataaatatacatatatgagatgactttttataaattgaattttaatttctagttattatacacagtatttttgaagtttacttttcttccttttttcttgtgtttgaatctgtttatattatatgtataattttgttttagtaagtttatccttgcatgtgtcacacataattgtggttgtgatgatctcgacctacttgtccataggagtaaacaatttttaggtggatttgcctctgaaagatatcatagatgaaacatgtagaagattaaagacacaatattttcctttgtttagccttacatatagaatgaaccaacttaacagtattaagaatttactttgtaaaaatatgtatgggtatataatatgttgcgttatatttatgaagtgtattgtactaccaaatcttagttaaattgtgtataagtaatttatatcttaagttttgaattttatctggaagctttggaattgagaaaagtgcaattttaaaataaactacttagagaatttttaaataaaataaattatttagcttcgttagtatgtaacgaagacgatttaacttagttgattgaataaaatatatgagtttaaaaatctcttacaacatgtctttgatttctaggaataaaaaaaagaaatgatgtactgaaggcggaatgttacaacctgaatatattattaatattttagtatataatgattaatatattaatccatagttactttgaattttattaaataaatagtaaatcataattaattttgtattttaaatcaatatttaatgactcatgattcaaatattttcaataataataataataaagtatcataaataccaataaattgttggcccgattagtactgaatttgatcttctcaaacatggtcttgagtttgagcattttgaataagaaaaaaaaacattgttatgggtaggcttgactttacaggtcgggttgccccaattaagacctaaatattaaacattcaactttaaataaaatatcaaacattcccaaaactaatagctaaaaataaattatataaaaaagaagaaacatctattaagtatataattatattttggtaagaattgaaactttaaacggaggtgtttggtagttggaaattttgtactttccctggaatcttacattggaaaactatgattctcacgtttggtatgtaactaataaaaaaggtttacaggaaacaatgatttttggaaatccattttagcttactttctcgcaaaaacattccaagtttctcgagcgaaggaaaagttttaattatgtaaaataactacattagaatttgccatgactgttgtttatccaaaagcttccatttccactatgttgcactatgtttatggtaagtgaattttaatttttatatttttacactttcagatgtttctcattgtctaaagtttttatatttgacattgtttttgttaagcactatacgatataaatcacttgcatttattttttattgtcatactaattttgatgataagagtcaatcattggcttccataatataaagccaaaagtacaataaaaaacatccaagttgttgaggagatgattcaatctttaagatgcattttataatgaagggtatatttacaaaaaaatattatatatccaaaaaagttataatgtaaccaaacgtaaaaatctttatttctcaaaaatatattaaaaataaccaaacctattttagacattctcaggaattatgattcttatgtatgtaaaaaaatttcagctaccaaaatttccctttcaaagaaattaaaattacctatggtgaaaatattttaaatttcaagcattaatttgctttagttggaaaaaataatttaagataaactatttattaccttttaatagtgagacaaaattatagaaaaagatttatgataagatttggattaattggagtttggaaattaccaatttgtaaaggatattaatgataatttaatagctaatcaatgctatgcatacaaaaataattattttagagtcaagtgtttaggtgtgtcagctcacaggcttcatgaattaagcttgcaaagtttgtgggttaaataagttgggcttgaaatcctctataaatcgatggatttatttttttaggcttgtatttgcacaaatccaaagactaaatgagtatatctatggacttgagcccatatatcccttagttgaggtagattttatttaaggtgaatcaagtttttagtgaagattaattattaataaaattaataaatattttactacaatgtcatggtgaccccaaaaaaaaatcataaataatcctattttgagtgaaaattaaatgcatcagaaacttttcttttatactattgttttttatgtgacattttaatgttttttaattcctacaaataaaataatttccaaataaattaaatattgaaaatttgaattgttatattgaataaatcattttattattaatttatatattttgataaaatattatttttatatatgtcaatacgtcatttatgatctgggctgcatagatattatatcatttataaagttaaatagtgtacgattagaaaaagaattatttcnnnnnnnnnnnnnnnnnnnnnnnnnnnnnnnnnnnnnnnnnnnnnnnnnnnnnnnnnnnnnnnnnnnnnnnnnnnnnnnnnnnnnnnnnnnnnnnnnnnnnnnnnnnnnnnnnnnnnnnnnnnnnnnnnnnnnnnnnnnnnnnnnnnnnnnnnnnnnnnnnnnnnnnnnnnnnnnnnnnnnnnnnnnnnnnnnnnnnnnnnnnnnacatatttattataactaggaattactagttcttagcaaaaacactaggcaaaatacaaagcaattcaatcaagtaatggctattatttttatagagaaatgacaacaaattcaattggcaggaaatcaagtaggcaaaagttgacatttagcaggaggatggttagatttattatacataaaatacttttcaataaattacatatagatcataattggatgagaagtagaaataaaggaaattgttgcgtatcaaacaaatactaggacatatttattataactagctaatagtttagtctaaagagtgcgaggcaaaaaacaaaacaaattcattcaagttattgccattatttttatagagaaatgacnnnnnnnnnnnnnnnnnnnnnnnnnnnnnnnnnnnnnnnnnnnnnnnnnnnnnnnnnnnnnnnnnnnnnnnnnnnnnnnnnnnnnnnnnnnnnnnnnnnnnnnnnnnnnnnnnnnnnnnnnnnnnnnnnnnnnnnnnnnnnnnnnnnnnnnnnnnnnnnnnnnnnnnnnnnnnnnnnnnnnnnnnnnnnnnnnnnnnnnnnnnnnnnnnnnnnnnnnnnnnnnnnnnnnnnnnnnnnnnnnnnnnnnagattagatgacaggatttttactcgtgtttattcattttcttgaaaaacaaatatttttatatatatagtaaaaaaaataccagatgttttggatcgggctaagtctgtcgacccttattaatataattctctttcaaaaataaataaataataaaaggactaaaataagtacataactattctatatcggtaagggcagaagggcatgtagcactgatattatggtattatgatttgaaggtattcattattcgtaaaataactatttttgtcccacatgataatttaatctttgaaggaataaaaattttaatttaaccacagaatattaaaagtgtgataattatattatgttattaagttttgtaggaccattttttaatcagatataatattcaaagatcaatttgacatatatttttttaaagatcaaattgatatttagttgtaccatagggttcaagtgaccttcatatctattttttttttttttttacaattttgatctaatttcaacttttgatgataactcaaatgaataaattagatttagaattcaagtgaatctaaataagagaaataatactaattaaaaatcaagatttagtggctattttttggcatcataaaattaaaagattaactaaattcatcaatattaaaatataaggaacaaaaatgaagttacctctaagcacgtgattatctggcatgcgattgttcaaggttaaccaaagacagtgatggatcttggccaaaacatagaagggtggggaattgattaaacaaatatacttaaaaataatattaataaatgtatttataaaaaaaatcaatacttactaaaagggaagaaaaaaattatagggacgggattagatgttttgaatttaaatcttatacatataattatcttaaatattcaaagataaaattttattgtacacatacactgatcattcgattccaacataatttatacctctagaaacaaaaatcaagtcgaacaaaaaatccacaaataaaacacatttttctcaatttttttatataaaataatagcattgtccaccaagaatccgacagattgacataattacagttagacagcttgcacacacattgtggaaatgatctatctggtagaaatatcgtatttgattctcatccagtgaattcagaatcgtacgtgtctaagtgatataaggggaaaaaaaacagtagcagtattgtgttgtccacgaagaaggtaggacatgacttgaggcacgtgcggcagaaatggaaggttcgaaaagctgagccctacgccgaaatggaaggttcatggtgatacgcttggagccaatgaaagggcagttgtgtcagagagaataatgactcagtctctcagcgcagaattttcactcccacctcgattcccgttcccccaaattcccttttcttgatgatggaatctcgcaaattagccgccatactctcctccctcgtctcccaactcctcctcttactcctccacaacattttccctttcccctccaattccctccctccaaacaactccatcctccccctcctcctcttctcccaccaactcgccgccaccctctcccccaaacaccgcaaattcctcaaacgcaaacgcgatttccagccccccaatcccctcacccgcacccctgactccttccgcaacaccttcctcatgtcctcctcctccttccagtggctctccggcctcctcgagcccctcctcgagtgccgcgaccccgccgcccttttccactccctcaacctctcctccggctcccgccttgccatcggcctctcccgcctcgccgaaggcgccgactacccccaaatctcctcccgcttcgccgtctccgtccccgtcgctaaattctgcgtcaaacaactctgccgcgtcctctgcaccaacttccgcttctgggtctcctttcccgcttcctctgacctcccatccgtctcacagtccttccaaaccctctccggcctccccaattgctgtggctccattctatgcactcgcttcaatatagtagtcaactccaataacaccaccaccaccaataacaacaacaaagtctcaatttctcaagtagccgcgcaaatagttgtggattcctcctcgcggatcctcaccatcgtcgctggcttccttggacacaaatctgattcccaaattctacatgcctccactctctacgacgacatccagcaaggaaccctcctaaacgcgccaaacgcgccgtttaatcagtatctaatcggcgactcacagtatcctctccttccctggcttatggttccttatacaaaccctgctcctggctctgctgaagagaatttcaactctgctcatcaaattatgcggcttccaacgctcagggccgcggcgagtctgaggaattggggggtcctgaggaaacccgtgagtgaggagcttaagatggctgtggcttacattggcgcctgctccattcttcacaatagtttgctgatgagggaggatttttcggctctggcttcggagtttgaggattgtaatcaaggtttttgcaatagtgagccttgtaatgctgctgcatttgagggtgaggctgtgtcttccgaggctttggctttgcgtgacaatttggctaacatggcgaaggaaactcgtcgtgattcgaagaattcttgattggtttaaagattggtgaatgggtgatgcttcgagttgtatgcgatttttttgggttcgatttgtttttagagtggacgcggggagtgtaaatatcactgcctcttgagcgtttgttttttgtttaattattactcgagaaatggttgttcttttgttcagtgaattgatccccgcgtctacaatgtctgaggccattgattcatatattttttttttactcactcctttgggttcaatttacatggacatggtgtttatatggatagttttaatcgtctatgttgggttttggttgatgagtagtgatcaaactcagagttttctgttgtttagttgtgtcttgtccatttggtaatgtgtcaaaaggaatcacagtgcaccaaactttggtgtactaggcttatttgaaagtgtttctcaccttttgtgaccgtagttttttagttttgtaggccccgttagcatttagacaaaccactgaagcttgaaagaaaaaaccactactgcttgtagagtgcattctcgattcattaatcattgctttgcaaccatttgatattgccatgtgacaaatctttttttattttcaacaaattgcagagacaattgaacttgtttgtgttgcccttagttttggttttacttaatttcttcagggtttctgtgggatgatggatgtagagattgatggagtgtgtaaatttcaatatgagaaaattgtgctttgtctgactgcacacacaatgcacgggagttgcagttaaaactaattatgtatggtttggtacctaaatttgtgatgcaaaacttgatccctgctgactgtaaatgacaccaaccgtatgaatggaacgacaggttacttattatgtatggtttggtacctaaattggtgatgcttagacctacaaaaccagtttacaagtcccttcttgattatatacttttgttactacaaattaggagaactaaaactcaggatccctctgatgtttttgtcctatgctcatttaaatctccaagcagttgcattatggctagttgattattctatcgatttctagttagagttgctgagtattttgtaaatgatgtctacttagcttcctgttctcaacacttgactaatttattactagtaaacaagtttctcctattttgttgtcttgtatgtagtacgtgtctggattatagttgggagagctcaaaatatttttactctagaagcaacaactttttccttcttcatttcgttattttacattgaagttctcaaaaatactttccaaacttcaatccaaacataaccttagttggagttgcttccgcaactctctcattgatatacagttacactgtatgtgataccatgctaatgtagtttaatgtggccgccgttgagagatgagggggtgttgaactcctaaacgtggatcagtacagaaatgggtataaacatttgctcttttgaattttgaggactttatctgtctattaaacattatgagtactgtacatattttgttaagatacttccataatagcgcgagactgctaattgatcagccttaagtctttgttttttttttcttcatgaaatatcattttgcagccacgaagagtatcacggacacagtgaatttgaatgatcttttgttgcttgatttgagcagtagttgctactctctaatattaaagaatgcgtttgattcacactgaggtacagaacaacacaagcttttaagttgcatagtttaaaaacaacaaaactcttaaaactatagcatcaataacatgatattttcttaaaacacattcatcaaatatacctaggttgaaagacatgaaccaatacattaatcggaaaatctcaatccaaaagccaaaaaattcaatacatttaccaaccaaaagttaaaaaaaaggacaaatttacttatgtatgattacggataaatatgtaattaatatattaaatctctacaaacaaaggtctttgaaatctcctgcccaattaataagcaagtagaataaaaaattatttattttgcttgaaaataaccattttctttggagaaggacctttttaaagctttttggacctttgaggaaataaacttgccttttctttgtctttcatcctccatcagctccaactcgtgaactttgagagttccaacaagctcttccacaggtagagacttcaaatcatttgaggctcatagagctatcacctatggtttttactgcttaagcaaatttcaaaaagttttggttatatgatcaagattatcataagttttacttagagaccttaaattgttcataatggtttggaattgtccaaacaatattgttcgatggtttcaggttcgtcccttttatacaattcatattggtggattagcatgcatattttagagtctttaacttatgaggttccttcataagcaagagttaaggtgtcacatttgtttagcaaatttaagactatgaatctttccatattctgcttcacacaaagcatacatgaatgagttcctagcctttgggtttagaagatacttggtctaatggtaatttctccatgcagatcgagggttctcttaacctttcttatctatgggaatgtagctctcattttccactacatcccacatgtctatatgacaattgacaagcatcaaagaattctattactcatagtgttgagtgttgacccttgaagagaggtggtctatcaactgccagtcctttttccatagtgcttcaagactgaaagatgacaacccatgtattttacccttatatttgttcttgaacaattgtaccaatagatgatctttggtctcatgattactcaatatcttcaacacatcttattaagtttgaaatgtgtggaccaaaaaattgaacccaaaattattaacataaatttatgtacctgataccattcgtttagtagatacacttaattacttttttatgtgaagtttcaaaccttgttgtacagtccttttcaaaatggtctgtgaagaaaatgatactaatttttaaatgggaatccttgttatcatgcttccacaggatgctagattgaacttggaaaggcatatataaaataactctgatggtatgaattgtgtgccaaacaaaatgtttaactttatgtaatagtatttaaacaagtactgttattaatttttttttccttactcattagtttaaggccgactaatgttaattagatatactgataagataaagtatgaaacagaaatatataattttactgtcattatttatttataaattaaattcatcttatataatcttatattcttgtaaattttaaaattaaagacgtcgggaggaaaagacactagattcttaacaacacaagtatataattttaattatatataatatctatacaaataacnnnnnnnnnnataacatacttttaagtagacatcatagttttattatgttaattagtgtaatgagtaaaatattttaaagaataatgttaaaaataaaagaaaaaaaataaaaaagtaaaataaaactatcatctatcaatatcttaactataatatcaaaataataaaataaatattgtaaatagtataacagttaagataaacagtataatataaaaatatccaaaaaaatagaataaacatttttacctattcttatcaatatcttatgtaatacaacaataaaaataagaaaaccttatcctaaaaagagaaaaacaatgatatcttatgagtagaagaagagaaataataaaaataacaataataaaatcaaaagaggacaaaagagaagtaaaaataaaaaggtatacactaacgttttaaattcattaagtaaattaaggtttcaaaagctgctacaagtaactaaaaaatttgtatgtcaaacaactactaattttttaaaagaaactatcaattgttaaaaataatcttgtatcacagtataaataatttattctaaatttaaaatacaatttatatgtttaaaatatttatttattacaaatttaaattataatatgatttttatatattaaaaataattatttattataaattttaatcatataaaaattaagtatttatcatttgctttagagtggctaaaagactagtattcattaaataccttttttcttcttataatttagcnnnnnnnnnnnnnnnnnnnnnnnnnnnnnnnnnnnnnnnnnnnnnnnnnnnnnnnnnnnnnnnnnnnnnnnnnnnnnnnnnnnnnnnncagttttgtcccttcaaattttttggttaaattgtaatttaggttctcctagtttcttagattcatgattttggtaccttaatcttataaattagtgattttgttgcttctgatagattattgacaaacaattatgattgattgagttgagttattaagttaattttaaattaatcaaaatcattaattatttaaaaattgaataaaaattattaatcctaatttttcacaattatgtgctcctcttcttctttgaaaacacctcttctacattcaccatcgcatgtaactccatcggtagtaacatcactttaggatttatagtcttttattaaagtttttaataattaataatttttatttaatttataattaatttaatatctctaataatcacaattattagttaataatctataggaggaccaaaatcataaatttataaaatcaggaggaccaaatgttacagttaaaaatcagggtgagcaaaatcatgaatttgaaaaattaggaagactaaaattacaaattttttttccattttagtccttgtaaaatgtatttttttttttatttttcatccttaaaacactttagatagtgttttttactgttcaaaatacttttttactatttaaagtgctatgtaaaacactttatgaaaaaaannnnnnnnnnattaccataaattaaatataattatttaatacgtatcattattcatatcgacatcgaatcatttaaaaaagcaaatacgatttatcataatgcaatgtaacattaaaagaacattgataaactatatttattatccatttatataataataatatcttatatcagataactattggagataaagaataaaggatttgagagagaaaaatttagtgttgagtgcttgaaaatttgaactccataccctaaacaccaaataattaatgctcatatattagccaaggatcctaagtcatagccnnnnnnnnnnnnnnnnnnnnnnnnnnnnnnnnnnnnnnnnnnnnnnnnnnnnnnnnnnnnnnnnnnnnnnnnnnnnnnnnnnnnnnnnnnnnnnnnnnnnnnnnnnnnnnnnnnnnnnnnnnnnnnnnnnnnnnnnnnnnnnnnnnnnnnnnnnnnnnnnnnnnnnnnnnnnnnnnnnnnnnnnnnnnnnnnnnnnnnnnnnnnnnnnnnnnnnnnnnnnnnnnnnnnnnnnnnnnnnnnnnnnnnnnnnnnnnnnnnnnnnnnnnnnnnnnnnnnnnnnnnnnnnnnnnnnnnnnnnnaaaattgtgaaaatattattaaagtttaaacataaaatatttttcatattatctttaatttctcattattattgaccttactacagtgattttaatgtaaatatcatattgtcgtaaaagtatttttagtcataaattccaaattaaaattgaagatctcttattttttaatgatagatcttattttgaaatattaggaagagagaggaaaaataattattcttttttaaataatttacatattttaagagtttaaacttattttccatattaatttatccactttattgaaaaattcaataaaaatcagatattgagttgaatatcttattcagatcttacattaaaaaataatgctctaagaaacttttataaaaaaaaaaataatgtcatacgaaactaaagtaaaatattcaaatctcgattaattctaagtcctaatgtcccaattaatccttcttcagtttcactctttccttccgctagcactaaagtgaaaaatctcagaataaaaaacgcacccacccaacacaacaccacacctagccgtatccttgttcctttaattacttcctcaactctctctgtccgattcttcaataatatcacgcgtttcttgtacggtatccatcttcgggattgttttcatcattcttttgcttccttaatcagcacgcggattcatgtttttgcagcatctgatttgattacgcccccaattattctccaattactgccactaattatttggtatctctcttatttattttcttcatttttggtttcagtgaaagatgtttatattatagatttagataacgcgtgctgtgggattttgggttttgggttccctgctttttccaactcttttgctccgattttggcttgtatggatgggcaatttggaataaatattgctgctttctgttcaaatatttgctttttttctgatgtaatttctttgctctgaattttgctttgccggacctaggtttgtggaacttcaaattttttttgctgcttgtgtgttttgagtgctttgttgtaaggataagtggtagaaattgcataaagtgtgtttcttttgatttgttagtgttgatctcaatgaaaatggaatggggtcttgtctcttcgttcagtataggtagtggtgtgggagtaagagttggggtttgtgaatattcgttgtggagttttgttgatgttgttttcaatcactgggggacatcattaagtgattatagacccttgtgacactgacagtgaacttggcttgacatcattgtcttataattgggattccctaattgtcctctaatttatgttaaatacatggattgaactgatgcatataaagtgagtgatggatgtaaatcatattatgtgatgaaatcattttatgttttgacttttgaatatatttcagaatctttattttgggggtaggtgggttcaataatcttgttagtccttagtttgatatccttaccattgatttccattgtggaatctatttagtagatatattacattgcactttctttggcattgaggcagttctgcttcttgctctagtggttttaaattttaattactgtttggtagcctgtgttgacacatgatagttcctagaatagatactctttaagtcttaaccggcttctgattgaacggacaacatctagtgtgtctattttgtgctttatggttagagtattcatgcctatagtcttaccttctcactatgttgcaataagatgtttctggggatttgtttgtttaatgatgtcttcactccattatgtgcaggagcatctgattttctagtgctttgatggctaccccaagtaaatcaacaccaataatagcttcagacactttggaacaaaaagggaagactatgactgaatcaaacacaaacattcttcaatgtcctttaaaccagcaactctatagctccttagatggcccagtagcaatcctttgggatattgaaaattgtcctgttccatgtgatgtacgccctgaggatgtagcaggtaatataagaatggctttacaggtgcacccagtaattaaaggagctgttatgatgttttctgcttatggggatttcaatgctttccctaggcgacttagagagggctgtcagagaactggcgttaaacttattgatgttcccaatgggagaaaagatgctgctgataaagctatcttggtcgacatgttcttatttgctcttgacaaccctccaccgtcctctgtcatgcttatatctggggatgttgattttgcaccagcacttcacattcttggtcagcggggatatactgtaattcttgtcatccctgctaacgtgggtgtttcttctgccctatgcaatgctggtaaatttgtttgggactggcctagtgtggttcgtggagaaggctttgtgcccccttcgaaggctttagtgccaccccgtggaggtccagttgaacttgctggacacttgctgggatgccatatcaatgacaactctgatggacaaaatgaagaagcaatagtttatagaggtatgccacagagctcttataactcaagggaattctcaatggtgtcacaatctctgtctgaatacaacaatggcacatcgaacacgacttgcttgccaacaactatgagatcacatagccttccatctgtattgaatgatgttccaggagggtctatgatgccttcgagtgaccttaatgaatgtcaattatgggtacagcctggggatttaaatggtctcaaggggcagctggtaagattgttcgaactttttggaggatgcctacctctagcccgagttccagcagagtaccagaaactttatgggagacctctttatgtatctgaatatggagcaataaagttggtcaatcttttcaagaagatgggtgatgccctggctgtagaagggaaagggaatcgtaaatttgtgtatctcagaaactggaaggcaggcccaagtgctcctcctctctctatggcaaagaaagacaagaaaggaaagggagcccaggaagagaatgtgaatattgtcaatggtggatgctcttcagatgagttctcagatgaagaaagagtagtcatcgaagagcatgatgaaagaagttgcataggaaagggcaatcagggtagagccggcaaatgtgaaattgatgaccgttttattgagcaattcaagtatgagctgcaagagattctggtaagctattcttgtcgaatattcctaggttgttttgaggctatataccagcagcgatacaagaaacaactggaatatcatagatttggtgtggacaagttggaagatttgtttgagaaagtgagtgatgtggtggtattacatgaggaaccagtaagcaagaagaagttcctggctgctgtaggtggttagaaaactcggcaacggactgccatatactttagccattctgatgttttaaacttatgctcagaaattacttgttctctctagcaacctcatccttttctgttttttactccttagaagtcttgtaaaaatgatatgctgggcatgtgtttttttagtcactgacctgcatgtattttattaatcttttctaaactttgtgtttacttccagtctctgcagccgattagctacttaaaaggaatcgggagacatgtacgagtagtggcttttgtacttctatcttgtattctatctcaatgtacactttttccatatatgttgacttttcgtgatactgattactagttgaacatcattccatttatggttctgtaccaagtttcagtgggagttgattgactatggtcgttactgaatatcttaataaaaagaaactaaagggattatcctttatgaaaataaggatcaacacctatagctagtaaggagaaaaaaattatacggaatcaaatttgtgtaatagtacttttaaagtttaaatatcaatgtctaccaatgcttttacagtttacaaatgtcataaaaggttgccactgcaaatatggtggctgaccagccaggtggcagagggaggatcctatggggtgtttggagtggcagtgtggtggtagcaaatcgatgatgttttcatgttcaaagtgaagcaactctttaggactttcagtttttcacgttttttccacaattatggcccatttaccgcgtatcttagtcaagaaagatacaatggcttattgacttgtgcattccaagtttagaactgtcaaactgttataccaagacctggagcttctcctttggaaccatgccttgcaaagaggaaattttcatgcatgactatgaaattgaaatctgtcctaaaaaaagcctcaattacaggcactgtgtaggtgtgagcggttcccttaaaacaatttctcaaaagtgtagtataataatcatcaacatttctcgtgtttcttaacttaaactgtgtgcaacagcaagccaatggggataataagagcaaagaaaacactatatttctcatttctcccaagattttaatatatggacaccttaaaagagtatctcctacttctaacaaatccacaagtcagtgagtaaatgagaaatgcaaaattgaagccaacttgaagaacctaaagattgtttcagagagagaacatatttggcggagactgtggagagccactctcaagtaaaaaggttctactgcaatatgaccgagacgtacttgaagatgaagcaagatatcttccatctccgctgtgaaacaatgcctcatttctgagcattttccccttgcttcttctgcctctatgctgacttccctgaccttcttcatcttcaactgcttgtagaaactcactgtgcattggttctgatgtctcatacagaagcctaagtacctgttttattgaaggcctagcccttccttctctttgtgtgcaccatactactacagagattactgtttggagctgatccaagtcaaaagactccctcacattgggatctactagctccaataatcttgtgtctgattccatgtatggttgagcccattctaccaaattcttattatcttgaatggctcgtcttcctgtcacaatttcaagtagtaacaccccaaaactgtatatatcacttttctccgtgagctcttgagtaacaacatattcaggatccatataacctggaattgaatttaacatccaaaattaagtattgtcaatgatggctgtagttccctggatatagaactatcctctgaattgtgtacaaagccaaaatcagttaagataaatataatgaagaaaagaattttatacctggagttcctcggatttcggtgttcacaggttcaaagcatactgagccatcttttgaagcttgtgcaaggccaaaatcagctatctgtgaaatgacgtaatacaggaataaaggagttagttaatacttaacggcatctgatgggagagtgtagatttgcactatccatatataacatcatataaattttgcattattttgaactcttggactacaaaaagaaaatgagtattagcagtagaaatggtggcatgcagtatgagggtcatccaaccttagcaacaaagttctcatccagtaaagtgttgctggatttaatatctctgtgacacagaggaggatcgcaatagaaatggaggtactcctgcacgagaatgagattgaaaattaaaatccataaaataaaagaataaagaaagagaggattaaaagcaatcggccagtcaattgagctaaatctcaaaattaaaccaataagagatattaccagtgcattggcaacatcaatggcaatttggattctagttcgccaacttaaaggtgttttaccaggggctgaacaaatcaacaaaatatattaaggggttaatagggaaaacaagctaagatattgatctgtttcctcggtactttaatgcaactaatttggtgcataacatgttttattgtcatgttcagtctggctgaaagtgctgagttaaaaaaagatgcagaaaagcacatacataagatctacatgaaaatgaatacaagcacaaggggggaagatggatgttccatttgtaatcgaaccaaatattatcataaatatgttattcaaaacaatatgtgagtgtgtgcgtgtgcatgtattatgttttttaaggtagaacaatgtatagatattgagaggcatacaatgaagatgatctttcaagcttccatttcccatgtattcatacatcagaaacctgccataaagatgcagaatggtttgattaattggtatatgatgtcaaagaacataataagcacacagaaacagatacctctcacgttttttaatgcaaaagcctcttaaagcaacaagatgccgatggtgcagccgagcaagaagttcaatttctctgcagaactcatcctccccctgctcacatattctgttcatcctttttactgctactaccagtccatcagaaaattgagctttatacacagttccaaatcccccttggccaatgacagtgctaaaatcgtctgttgccttttttatctccttgtagccgaattttcgaaacatagacgaagagcctgcataccacccccacacccgcaccccaaacaggaagcatagtaagaaaaaataaagtgctggtttcaatatatcacttctaagaaagaaataaacagaactagtgtgatcaaccagaaccttaccttcctgaaatttccatgttgcacaaggaggtaaggttttcgaacaggatttaccaaaattatcaggctcgtctagctctctgcttttctggcgaattagaactatcaagactatgagtgtgataacagcaacagctgtaactgcaatagcaatacctggaactaatgtcaaatgatatgaatggtggtttccctttaaaggcacacttaacaatggttgacttgggccatcagcaacccgtggggggcttggagaagccttaggagcaggcaagtatggggatggctctgaaactggcatcacaaatgtaaaagcatgatcagctaaattttactttattggtaacaatacacaaacttcattgtatctgtggaatgaatatttaatagggaaaaaagaaaacaaaaagagaagtcatttggcacacattaattattataactagactttatacagtttattcaagcataatttagttaatactgttttctattcttttcctgtcgtaccaatagaaagggatttgtgcaacaattgtttatttagtaagaaatgattatgaagaggatctatagcattctaaagtagagatctcatctattttaccagcttcacatcataataagtctcatagacataattatataatgtatgtagtagcattaacacatgaaggaactcatgcacacagagagacctgaagaggtaacaaaaaccataaaaaaaagagacctgcagagggagagcatcagactgattcctgttaaaaaaattaatttaaaactgttcttaccaggaggtatgagaagtccttgaaccccaaagaagcaaattgcaatgtcaataatagatgtctcatcaacttggcttgctagcgcagcaaaagtggcatcacgacatgtacttagtgttatattatcttcaattccgatatgatgcagataaccaaagccagcatttaagcacttcttacatttactttcctctccaagtggcgctttgcaattttttgtgacctccgtaaatctgggggattgcagcatttggacaacattagttctccctttgcattcataattaacaggaatttttgtcccaaaaccacagaaagctgttgcattttgtgcaactccattaagttccaaggtttgaaatatggtttggaggcagacgtcagacgcattttgagggacccctaggttgcctgttgcattagcaaaacgagcaacagaaattgcaacgttagtgttaatgtagcgacaacattttcccctgtcaccatggttagagcatagggaggatgccagggtgaagtttgaaccagtaatattcaaagggcaatctgcaaaaggagcagcgatattagagtattagaccactaaatcacatttataatccttcacctgtactgccaacagtttactactagtacatttaaaaagattgaccagtcatgttaactcccataaagttaacatgcacaattctcaagatataaagatatcaggtttcctaaccattaccctaagggaaatggttcaggaatcaaaagtgaaaattttattaaaaaatgtaacttccaaatatttaccaataatttttttctatttgtcaattccttagccatttccctcatggtaatggttagagaaactgtacagagtacagccatatcctgtttctgtgacagtattcagaatgcaggacataaaattatatcctgaaataagtccaatctcagtttcatttcatggcattcttgcggtattagttttgaatgcatagttctttgattattactgtttagtgtttacattcacaatatgtgcaccattaaattttttggctcccagcccaagtcataattccccatgtataaatcttgaatatggaaaaataatgtggaagagtatctatctgaaatggatactggtaactgttttgtatgaccaataaaataccttcactttcatcacaattctgaacacttccattttacatagtttataaccatttaaaagtaccacagagaatgccaggtgtgcaatgatagccttaactaagttctaatctatagattaaatgtggtcaaatgtttctactttctgctctttagaaggtactataactcagtgtcctctatgagcaaacctagagtaattgtgattttgtaagagcagtgcattgaaaattctctatactaatttctgcaaccattctggcggtaaaagcatttgttatgaccacaactccatcaagatacttgttcctgtgttcaagcaatattgattttgggaaaacaaggtgagagaaaagttattaacatagtgacaaagtgcataaatgtccagattcattaatacctgtcaatcctttttctcatcccttttattttagtttcccaataggtcaagaatgcaatgcaacggggaaaagcaatcataactactacgaccaatgtgtaaatgctgcaagaatatcaaacacaagttccaatttttttcacattcacattaataaatacacatacacccattctcattcattcctaacttgacagttgacaccattccttacccccaagatgggtaaaagagactccataaatcaatgcaccagcatcataacaaggcaaaagggtgaaagatattgaagcaaagctacgaaagaaaagaactttaagaatgaactaaccagccattatgacaggaagctgtattccaagaaaagccaacaatcccaccaaagattcaagccagcagagcatggtggaggagttggaagagaataaagatgaaaattttatttgagggcttcaagatacaacaagattgtgttaatttttatgtgttaagtgttaaccaccccattttgggaacaccatttcacagcttcttgctgctccaataggttttattagacttttgagaaagaccggtgtgtgtgtgtgtgtgtgagagagagagagagagagagatggtttgtttgtgtgtgtgaatgagtgagagtgagagggttttttgtacttttgtttgtttggctctgaataaatgcgcactgaataggaagaacaacaattttaattgatgctttcgtggggtacaccttttattttgtttctgattccacagtacaccagaggctcccatttcatttttgtcattccatgccatgccactcccaaaaaatgttcatgtgatagctgttcagacctcgaagctaatgcctaatggcaaatactagcaccaaaattcaaatcaaactagtaaaatatgaatttttaaattaacattaaaatcttagttgttgaatatataatatctataaaactagatatgagaatgtttcagtttaattagaagtatcaggtttggattttggatatgaaattttgttaaatatttataaaaaaaactttattatacataataattttacttattttgaataatattatctctgataaaatatatatatatataatttagacaaaaaaatgtataatatttataactcactagtttctactgaatatataaggtaactattattaaaaaaaattaactagttgttgaattataacaagtttgatttgtacgaaatcatgtatatatttttttgtataaacttgatacgtgaaaacgttaacattgttcaaatagtactgtgattatgtcctaacgagttcagacaattatgaaggacagacacttccgatcatggtgctgctgcatttatgagggtaaatttgatttactactattttattttcatttatttattatttttgtgtgttgttgcaacttgcaacttgcaacttgtaactaggaatgcacttctattttcacttttagtacttcaataattaataatggctaattaatttgttacaagtgttgattatttgcaaatctctttttaggtacataaaatttgtttggctaaaatacatattttgtttctcatctcattttttttgtagtttagtttcttaaatactaaaaatatttactttagttctttaaagtgctttttttagtatcaacaaggttgagtattctttttgaatataaaataaaatagtgcagatggaacttcccagttccaaaatatggagcgacaagggtaccttcttatccaagaggatttttatgttttttagaaatcgaggcttctccttgtggagcatctctgtacatatctttaaatgttgtagatctaacatgctttcattaggttaaatcattttggataacagagatatccaagtctaacaaaaaaaactaatcttcactacacgatcaattaagatttaatctcgattaaaagagatattcatatttaatgtatcaaacaaaattacttttcaaaagagaaaatctattgggaaaaaaaaattgttacattaagttagtcgttttatcagataaaaagattatcatgtcatctaaaattagcattattagtaaaataaagaatctgattaataacaaattcaatttgataaaaactctttaaaagaccaatttcttttttataattgaagagatcaaccttaagctaaaaaataaattattgaaagagtctaatttgatttttataaataaatacaaaaaaaaaatgtatcttatcctatctgtttcgagtgactccactctccagcgtcggcagacagtgagattcttttcttatggaatgtaaaaagcttaatcctttacgtggttactgaaatttgttttagaagaaagacaagatagtttgtcacactcaacctcaacggctaaataagaaagaagggtctccaattccaaggtctccatcaactcataaatcataccaaaatatatgtcatggatttagttgcatcaccatgtgaggttccgtgggaccctattacacctctgttgctacatacaacatcatacatgtgcctatattatgtgatgtgcttgtttcattccgtattatatggtggccgcagacagcacccaatggcctagaatgccattcatactgttacattggagcatgtttgtttctctttgcccacgggtttgtctatcaaacgtgattttgcattaagatattcatgtactagtcatacaaaggaagaagaaaaatcattacaagtgtgacaatattggtcttcataattttctattttatttattaactattcatggtgtatacaactttgtgtttataagacagactttccaacgaagaaagaaaggaggaaaaagatgttgtgggtttaaatttgtaaataataaattaatcattcatactgatcgataaaaaaatataatttatgtatgtatttgctttaaatatttggaaaaaaaaacgcttataataagtatatctaatttaaatatgtttatcttccgtaaaagatatatgtgatatagaacaattacaactttatcctagttgtaaattaaagactcaaataagtttttttttctttcaaattttgggtcaattttagtgttgatttcctacatttaaatttattttttatataatttttcaatttaaaaaatgttctttttagttttgactattttgggcagtttgaatgtatatagaaaggacgaacttcattatacatttgtccaataacgaacttcagccgagcaaagtgagtaagacaaaggtatcaattaagaaatgttaatgttgattaacgtgcaaaatctattggttagggatagaaaaagccaacgagactggatcaaaaaaatattgtataataagcaacaataagtgtgccagctattcttatctgttttggctaaataattccaattgagaaattgtatcctgaaatatgcaacacaaaccatttttttttttttagttttaacgattgaattaaaagtgttttaaaattaaataaattcaattttgattttactcaacatgtactattttaaaatttatattttgaaaataaaaaaaaactaaaaattcacgaccaccccaatcaggagttgaaaagcttatttaaaatttaattgtaagaataatcgttctatctcgtgagctcccaattaatgatattgcaatcgtatatcgaatacgtgaaaaagaatctaaatttgatccttatataatttattattgggaagaaatgataaatttaaagtgtgaataaaacctacattgataattaatttcataataaaaaattgaaacttataaaaatatctcatgattttactgaaaaattaaatgttctaattttaaacaaaaaaacactatgtatgtaagaactcttttaaaactacttttatttgtaagacgttcaatttgatcaaattagaaaggttaataacttgcgacaaatatttcaagttatgtgaaaaaaaaaaaaataggtactcaattttaatttagtttagctcaatttttcttcttctttttctttagtcctttaatttagttcaattttaaaaactattaagcccacgcagcctaatgcacaatcaccagacctctatgaggttcaatttttttttataatgatttatagtcttgtttatttggactggatattttaattagattaaatttacatattaaaaaaattaataaaaggctttaaaattaagatatatttattatgagtttcattatgttacaaaaaaatcaaatatcaaatgttaataaataattttttaatgtagaagtattataattacagaatataaaacgaaaataataattttatataaatattatattacatattgactgttttgttattgatatgatatgattataaaaaaaaaaaaaaatttaaaaaaatatagaccagtagtagatcagcgcgctagacccaaagactacattctgtgaatccgggggtgttctatataaaaaatcttccttttgggaggatgtgttctaagttaggcaaggcaaattttaaacacaaattaaaacaaaatctctttttgtaaagtatcttttagtgaaatcataatagcaatggccaatctatatgttcttaaaggctaaacatttcaaacattcttaaagcagttaattaatatatcgaagatgctgttaaaaaaattaatacacgaaagcttacatatacattcaacggtgtatatatatnnnnnnnnnnaaaaaaaaaaaaaaaaaaggttttaaaaaaatatagaccagtagtagatcagcgcgctagacccaaagactacaatgagctaaattggcccaactaatattgaaaattgtataaaccccgttactataagccaacccaaattcacacgtatattcaattttattttcattttctataaccaaacaagttagttatcattttgctaattatttatttttgtcgactataactatttttccaatttgggttatcaaaaaatgtttaaatactttttcattcttgtaatttagttttttttttccatttttatccttgaatttttttgttttaaacttataatatgtttgttttannnnnnnnnnnggcaaggcaaatttgaaacacaaattaatacaaaatctctttttgtaaagtatcttttagtgaaatcataatagcaatggccaatctatgttcttaaaggctaaacatttcaaacatgcttaaagcagttaattaatgttcaaagatgctgttaaaaaaattaatacacgaaagcttacatatacattcaacggtgtatatatatagtttgatcatttttctggatatcttttcttttgtttaaaattctaaaattcaaatatcatatnnnnnnnnnnnnnnnnnnnnnnnnnnnnnnnnnnnnnnnnnnnnnnnnnnnnnnnnnnnnnnnnnnnnnnnnnnnnnnnnnnnnnnnnnnnnnnnnnnnnnnnnnnnnnnnnnnnnnnnnnnnnnnnnnnnnnnnnnnnnnnnnnnnnnnnnnnnnnnnnnnnnnnnnnnnnnnnnnnnnnnnnnnnnnnnnnnnnnnnnnnnnnnnnnnnnnnnnnnnnnnnnnnnnnnnnnnnnnnnnnnnnnnnnnnnnnnnncttcatccatctgataaaatctaaaatacttttgtttgtgaacattctaaacagtacacaagatgaatattgtattatttaaatgcagaagataaagggcgcgcatatcttttgaatataaatttattttccatttcaattttaacattacaaacaaataagattttttgtaacaaaaaagcttataataatagtgttaggaacaatagcaaaaaaaacccctttttttctagctttttcttcgcataacagggacatcttactatactagtcctatagacgtgtcatatatattacaataattgaatagttccccgttttctttattatttttccttcttttttttccattctttgggtcactatcatgatattattgtttgtagcaactattttaacttttaacaacacaagtcacacgtaataaaaacaactctactcaactaatatcattagaccaaagcattcctaaattactctaagctgcataaccctttgcaattgttttagacaaattaatgggatccgacaatggaaatatgattaaaatatagattagtaaaattcaagatattctcttgtagccgttcaaatatatgaagtttcatttccaatatatatatatatatattagtagcttgtctatgtaattcgtaatttggtgttaacccaaaataggagatggaggtatgtgcaattacatttgcattctttctgctcggccatattgcctatattcacactttcatctttgttattttgcagaactaccttctcattgctactttgatcagcacaagtctcgtatttgcttgttacattattctcatggtactttgttttaactagaatatattccattgaaaaactaaggcatagcaaatcttgaatcttaggcttaattttttggttcttaattatttacaatttatcaaagacctacttatataaagctcttagaaatatttaaaagttgtgacatactgacatatatatacttgaaccataaatctttgtttaaataagtaattcttagagtagcattttaaaattctcagataataataccattttctaattttaaaatttctaaaattttgttgcaaaattgaaaaatataaaaactaatttgaaaagtaggcttcatagaaacgtttacaattatttgtaaaactttagctcaatctcttatccagccttctctatgataaaatgaaatatatattcaattgttagagcatatttaatgttgaatcttggatagatcttaaattgaagatttgattttttccaaatctagcaataaagcatccctcaatatttccatgttggagatccatttcttaggaacgaactctcaaaatctgatcttccgcacagtttttttttaaaaaattcttcatttgataacagtaaaatgcaaggaggaagaagaacagttgaaatacacaaaggaaaaaggagataaagaagaacaaaaacacaaactgacaattgaatataaaaaaacatcaacaaaaataatacaatcagggggaatgggggttcgcgcataagggaaggggaagaggggtcgcgcatgtgaaggggaaaggggaaaggggaagggggaagagggtagaagaagtggggaagaagtagcgcaacactgaggagagataggaaagaagaagaaaagtgtagaagatggtaaagtgggtgggtggatgggtgggtgaggagagaagaaaaaaaagtgaatgttggcgttgtaggatccatgtgaggaagaataaaatatttaaaagtggagtccatgtgagatttattaaaatttatttaagattttacaatgaaatctaacactaaaggaaaaaatgagagagatctcgaaagatcttcaatcctacatagcattataagatccaccaaaaagtgatctaagatcctaatttaggatctgtcactaaaaatgctcttaaccatttataaaaaatcacgattcttgattatttttgtcaaagactttgtcagaaaaaagtagttaacaccattcaatgattttacttcatgttcttcaaaattctgctaaaccaaataactacacatattttatgagtagttataatatattatgatttcagagaagataagattttttttcttccttgatgggcatgacacaattttactttctaaaaaaataattaatggatcttagaagtcttttgcataagtttatttaactaccacttagtaatatttaatgatgtcactaataaataataataggattggccaagagtatttgaggtcctatcctaggcaaacattatattaggactttttagtaatatatttggaatatgtgttatataaaattatttttaaatttattttctttaatttaattttttggatgtaagtttagctattaaatttgtataatcaagattagaaatgatttgtttttcatttgataacaaaataaaatattcaatgttcttaagacacattagaaaacaaataagatttattaatttaattttgaaaatcttctttcaactaaagttacaatgaaattaataattaatgatattttctaagttataaatgcattttggaaaatatttttttaataaatttaatattttaagtagtgttttaatttttacacttaaaatatttttactttttagttatatatacacangttttctatacgaagtcttatttaccttctccttgtcatatcatttcaaaagcttcttagtaacatttattaaaatatttggcagtttgcattataaaactttttcaatagatttacaacatacttcacttttcttgagaaataaaatttcttcaatgatcttacaataactatatgccaaacaaatactctgtaaagcctaagtttgtcatctcatgcctaagcttgttatataaattaagttatcaacataaaggcaaataatgataaagtcatgcgtgccttgatttaggatataaagagaagggtagctatgagttattttgaaagactaaattactatttgagtctctaaaaatgtaaagcactatcataatagtttttaaaattaaaaaatgtcaaatatatttttaaaattaaaatttgttagtcatattagtccatgttgctagttttgttagagtctataattatagtaaattataaaattcaaggactataatgatgataagttgtacatatcaagaggtaaaatgagtaaatgaaaatagtttcaatttcagatttttttttcacattttttttaaattggagaactaatatgacagtgnnnnnnnnnnnnnnnnnnnnnnnnnnnnnnnnnnnnnnacaattttaagaattgaaatgatagagtactcttatgtgaaatctattctactaaacaatcatcacttttatttccaactccgatcccaaaggatgttttaggtcatacaaagcttttataagttgacaaccttatctttttttcccttgaattaattagataaccttggggttgctgtatatgcatgttctactcaagtttccattgagaagtcttacttcacatctagttgataaaataatggctttaattcaagtaataataatggcttcgaagtagttagattatataagagaaaatcttttgattcttcaccataaccaagagaaatttgtccgttttactctctcatcaagcttttctttgttttagaaatgaaaaaaaatgatataccatgcgattaaagaatttcaggaataatctttattttcttttgtgccaagttttgtaaagtgtcatattagtcaaagtttttgttaacgtattgtgaagagaattgattactgttctggaaacttatgctcaagtgttatttactagtttttttggctttcatcgtactcgccattttggtaatgttttatatgcttcttattgttagatcagtctgttatggcttatactagttgaaaagttacttttgattattaatatcattttctttacaatgatcccagaagactttgtaaataagcttttattatcagaagttcttaaagttataaagttttgttgattttgatcttttataaggatccttgagaaattttatgatttatacaagaaaaattgtccacatcattatagaaaaatcacaaatatataaatagtaagaaatgtctattgttgctaaatgatgaagttcttgtaggtccctaatggtctgcgtgcacgagctataaacgtcctttgactctccaaggtgaagttaggaatgacaactttttaatcttgtcatagattcaactttcaattcatatacataatgattgatatttaaggaaggtcaatcgatcaccacttcttttttgtcgtaattctttcaaattttgataattcaagtggtcatctctcacgtttgatgaaaaagtcatctctctaactaaaatgaaaccttaagtagcagaaaaaccttgcttaagtcataggtatggcatcccctcattggttttcttttttcttttttttttatcatttatcatacatgtttttttaattatcaaattatactaaataacattttagtatgatttggccaacactcaagattttgagataataaaggaacatagaatttcttaggagtgaccttatcattatttattggccattcttggtttgagctttccctcccatatactcattaaatcttaataatcgcttgtgtagttatttttttgtgtttcttttgaacaatttttttaattgtatatctcgctctaaaattttatctaaaaatagtctcatccctattttattcatgaacttcaagatagtttgtcaattcatgaatgttatatgtagaagaatccttaaaaaaagtgtttaattgcactcttaatcgttctatgttgaattgtgtatgatttatgccttccattttttatcaactatttaaacaattttggtatcatctgtcaatattcttctacttagaatcttcgaattattttttttatccaaatatttataggtttataatgtatttgagatnnnnnnnnnnnnnnnnnnnnnnnnnnnnnnnnnnnnnnnnnnnnnnnnnnnnnnnnnnnnnnnnnagaagtaagaaatttagtatagaaacttgataaatttggaagggctttacaagacatgagcttaggatttgaaaacgatactacctatggtcctttatctaagaggagaaattttgttctaattataagaaacaaagttgagccaaataacttgtttgaaatatcattgttaggaatactatttcaggttcttcatataagaaataaatgagtgcaatttttttaagtaattataaaaaataaagactcattttcaaattattaattgttaattttattggctaaattataatttttgtttccattaaatttctaatacacaatttgggttttttttttgtgattttagtctttaaattttagaaaattcataatttttgttgaatacttaattttaaatatgtcaattatttaacgtatcgattgactaatgacatgttagtattgtgatgaagtttaatattttttaaaaaattaattaaaatataataataaaataaattaactatgcaaaattgaagttggacaaaaattatggattttttaaattctacggactacaattgcaaaataatagaaaaatcaaaattaaaggaaaagcaaaattacaatctagccaatattattttatattcttaatttattgtgaagtctaataatgacacttaattacttcccttgcaactaaataatatagtgaaataagtataaatggtttgatcaactagtcattataaatatttcattaaaaataatcaattaagtttttatgatattatacatcaatatttgaccaaaagatacaatgggctactttgatttattaatagacacatgcatcatgattgtaaattttttaattatttaatttctaaaaaatatttcatattcattatttagcttctatcataggttaatccattcatcatttgaagtggttgatttttttttctttgtgagaaacatttttctaataggttggagaaacatgttctcgagacattaatgattgtgacttgggatcacaatgcctggagtgcaattcgcaaactcgttgtacacgaattcaaactataagtcctatttcaagggtccttattatagcctttatctcattttttttattattttgtcttgtacttgctaataaattttaatttgtatatgattattgtgaatgatgtataggtgagacatctcccatttaatcaatactcatggcttacaacccataattcatttgcatggagaggagggaactcaagtattggttttccaattttgggcatcatgaaccaagaagactccattacagatcaactcaaagtatgttacatagagtctgccaattttattttgttagagacgaagtaaatgagagtaaaactatttaatcattggataaatatcacttttgcctttgaaagtgtgtagtgttataaatccgtctctaaacaataaaaaaacaaaatttaatttccaaaagtgtaataagtgacacaaattcgtctcatcattaacttttgtatgttaacttttaggaattcgcctacatggcatgcatgaattgaaatatcatgaaattgatgctcatgtggatataaagactaaagttactaacaaatatgtctctaaatttaataatttattgacatttttgtcatttaattatataacttactaacaaatatatccataaaatatataaacttaattagttgacattaataataagatacatgcaccaacaacacaatagacttagaagtttctgattttgttattgcaaatatttattataatatattataattatatttatattgtcaacttatcacaagataatcaagactcaataggagacaaggcatggataagttcttaaataaaaaatcactttgcttaatctttaatggatcatcacaagtagataaaaaaaacattgtagttcttgttatacctctcatgtttgtttctatctacttgtggatgatccacttaatatttgacaaattgattttttttttatttgaaaacctacccatatcttgcctcctcttgagtcttgatttctttgtaataaattgacattataaatataattataatatataacaataaatatttgtaataacataatcataaactttcaagtctaatgtgttgttgatgaatgtatcttgttatgatgtcagctaactaattaggtttatatattttgtaaatatatttttcaacaagttgtataattgaaggacgaaaatgttaataagtggttaaatttagggacgtatttgtcaataacttttgtcctatcccaatgtccacatgagtatcaattttgtgatatttttgtccctatatacacatagnnnnnnnnnnnnnnnnnnnnnnnnnnnnnnnnnnnnnnnnnnnnnnnnntataacgtatgttaatggtgagatgaatttgtcttattttttattttttacacttttagagactaaattttatttttttttttattttccagggacaaatttgtgcgctatacatttttaggaatgaaaataattattatccttgattgttagataaaatgtcctttcaatttctaaagacaaattcatatacaaatatgcttataattcttatgagacatttttcattgcagaatggtgtaagaggattaatgctggatatgagtgattacaaagaggacatttggttgtgccaaggaccatgctctaaatatacagcttttgtaagacatttgtaaaattttctatatcagcaccataacaatgaaaatttattgattttgtttgatttgattatgcttaaatatacagagagttttttaggagttagtactaaagaaactatttacacaaataaatagaataatttcaaaattatttacgtgatatgaatttttttttttacttaaaatgtaggtgttatcctgagtgatcttttatgtttattttttgttatgtaggaggagacgtcatttagaacgacgtctcttgttttgattgatgtatttctttttacattgattatttataatcgagataaaaaatattttttatatcaattactataggataaaaaatgaacacagaattatttgagatgacattttatgttatcttaggtgacaaaaataatccatagaatgtgaatagtttgaaactacagcgtaaatagttttttttttaatactactttcgtaaaaacaaagtcttaaagcatgctttacttcacattctttagaaccctgattttgatgtctgaaatatgatttcacagctacctgccatttatgttctaagagagataagggcattccttataacacatccaacgcaaatcatcaccattttcattgaggatcatgtaacatcacgaaatggtgtgaataaggtgtttaatgcagcagggttgaggagattttggtttccagcatctaaaatgcctaaatatggcggtgattggccaaccgtcaaagaaatgatacgtaggaatcataggctaattgtgttcacttcaaatgctactaaggaggctcgtgaaggaattgcacacgtgtggaattatgttgtagaaaatcaatgtgagtcccataccattccttcaagatcaagttctatattaatggctaaaatatgttttatcacttttatgtttatgaggaatttatcaattttgttttagatttctaataaataaaaaattgtgttgaatctcatataaaacaaaaaaaatattttttatccttaatatttgattttaatctctaataaagtaacaaattttgttttagaaaataaaaaattttgttcattttgtattagtcttttgaaaaatacttcataaagactaattaaaaggataaaaattattaggaacctaaatcagaatttactaatttatcataaactaaaacaaaatattaaagaccaatttctttttttttttataattaggaactcaatgttaaaaaaaattattagaaactcaaaataaaatttactaatttattagagatctaaaatatattttagcctatattaattgagtccaattttgacaagttctaatattgtagatgggcatgatgggatgaagggaggttcttgttcaaatcgtgttgaatcattgccaatgaacacaaccacaaaactagtcttaatgaactactttcgaaatgtacaaaattctaaagaagcttgtagggataactcatctccattgattagcatgatgaatatgtgcttcatggttgcgggtaatcgatggcctaactacgttgctgttgacttttacaaggtaatttttttagtaacactttgataaccattacctacatattgatatataatattcattgaagttaatttgtggatggaacatttagagaagcgatggtgggggagctccagacgcattagatatggcaaataaaaacttgcttgagacataaggaatgcaatgaatgacttgtataattatttttgttttataagatgaaggattacacaatgaagaatgtgttccaattatatgttgaacacatctttctctctcttttaagcatgttatcccctgcatgcatggttcctaatttctttacctgatcccactagctctcattgaataatagcaacataactttttcccattgttttttcttttcaaatcaattggcctttggcacagtctgaacttgatattccttttgcgcatctactattactaaacaagcaagttgggttcatattttcaattttcttgaattaaaaaattaagattaatggtttcaaatgttattcaaactttggattattatttataatgcaaatgttactgagctgcttaatgcaaacttggcttcctcactctgtaaaagtgagatgtctctcgatcagaagacattgaagcaaacttcagaaaaataaaatatgagaattttacatattagttaaatatatcgaataaggtgcgtgagttattataaatcttttcatatttatttttgatttttatcgtgaaaaaaattgaaaagccgtcagaattgtgaagaagttttgtagaagaaatgatggcccctttttcttggttgttggttttggggttcgggaaatgcttttggaaagttcttgggacaacttggttgtagagagaaaaacactagagaaaattacataactaaatttttctttaaattatttttaaaaaataagtgggttttttctatagaaaaaaggtgttggttgttatgattattattaacatttaacaatagttataaacagccacaaagtgcaattttttttttaaaaaaaagtatagtatttctaaattaaagagacaaaattagaattacaaatttttcaaaaactaaaattgaattgggaaaattttagagggactaaaaataattttaacacacataaagaattgatcaaaattaatattgatgtaacttacacaaattattataatataaattactttatataaaatatatatttttatcaataatgtcttatcttgattgtttatgtcaaaacttatattaaaaataaacaacaaataagatagtaatcaaattatatatatgaaaaaaatgtctcttggatgaatattttgtttaccaaattatatatatggtctctttgatgtgatatgtttgtttaccatcatgtaaccaaatcaataatttatttattaaggggtttaactcacttggttaaaggaggaagtgtgagttgttgtgaattttttaacattatcttttatttccaaaaataaaaaaaaagataataatttgtttatcatcaaggaccaaatcaaattatattaaaaaagtacatattatgtcaattttgattaatataaatgaagtatcatgatttaattattaatttgatccctttgttaaaaatgtttaattaggtcgatttattttttaaaaatgtctcaaggtggttctttcctcccaattgaacttgaatcattgcgtagcgtcacggaattctaaccattaaaagttctttttgtgaatatgcttttattggcgacgcagaccatgcaagcaaatactcgagtccttgtgagctttgtgaccactatcacctgaactaaaagccacgcaaacccaaatttcttcataacttctgaccttaattaaactacatatgttaagtgttatactttatgcacgcaaactaattaagcttcaaggagtgaaacagttagaaagccaaattgttaattgaaaggaaaggattttggataatttagcttgcgaaggctttccaactatgaaatgaagcaatctagctatctcatgctatagtctacagaacttgtacattacggtgaagcaatttttgtcatgcgttagttaatgaaccttcaaaagagagttcgaaacaagaattgcttcagaggaagaaaaaaaaaaatcaaaagagttcgaaaaaatattgcttcaagaaataaacttgttttgacttcttcagatagaacttgtaccttctttttctttttgtaggaagaaattaaacaacattagcttgtacgcataacattgatacggcaggaggctgaatgattgaaatctccctatctataaataattatttaaaaatgctattttttttgaagtctttaagttttttttttaaataaaaataacctaattattatgaaacactataaacaactttttgcaattaataagtgtttttcttttaaaaaatgcaaaataagctaagcattaatcatatacacgacgagataccaaaaggctatggtcaactggttcatttttcttcttttctaatgttgtggctagttgttgtcttttagatatctttgttagttaggataaaatacttataaaaatgagttttttttattattagtgtatatttttttttcttaaaacgtgttaagttgttatcacatgatttaaatattttatctataataataataattattattattatttaagannnnnnnnnnnnnnnnnnnnnnnnnnnnnnnnnnnnnnnnnnnnnnnnnnnnnnnnnnnnnnnnnnnnnnnnnnnnnnnnnnnnnnnnnnnnnnnnnnnnnnnnnnnnnnnnnnnnnnnnnnnnnnnnnnnnnnnnnnnnnnnnnnnnnnnnnnnnnnnnnnnnnnnnnnnnnnnnnnnnnnnggttggactaaccattttaacaattctgaattatcacaattaacatgtttgtaaactctaatttgattatcaacatatctattacttagtattaacccttttgtttctaataagcaaatataagtcttaatgtatagagaaatacgaacaacacatattgttaactcttgtatataaattaagtaaaagtataagtgcgtaatgcatagagttatattgtttttatattttttataacatcctttataatttatttttcaaaagtttaaaagatatgcggtgtattgtcaactatttagtaattattttatataatttttaaaataattatcataaaaattaacaattttaatttaagattagataatgatacactttcacttgaatttcaatacatatgttatttatatattcaatgataatatctcttaaaagtaaaattttggatttgagttatgtaaataaaaataatataataagaataatctcattaaagattttagtgatcaaccaaatttcttgatagagattaatgtattacaaagttagatatacactttatatcaataatataataaaaaagaattcaatgaaaacattgttttatttttcagtttacaccttttcccattgctattattttctccctctaatattttttttaagtatccctctaatataaaaagggtgtacaagtgtaactttattttaacatatatatgttggttaggagaagatcattagttaacaccttgacacataaagctgctataagatggttcacgttcagctcatacgtcttgttcacatgttgcactctttggaattcaaatttcgcattcaatctttgtaactgacagataaaggcgataatacctcatctttcctctcacaccatcaacaaaaccaaataatgatgatgcaggtatttcttccttccttcttcctcatgcatgctctgttttttcctctgttccaaaacagagccttcactttcctctctttctttctcgcagaagccaacactagcaacaacccttttcgcggttttgctcctaatcccttctttacttgctctcaaggtacaaagtaacagctttaacacttctcaataaccttttttagcttttctctttgataaaccagtttctgaacttgacattcttaaccaggaaggacaaacatgcgtagccgacaggaactgcgactcgggtttgcattgcgaaacttgcgtggccaatggaaacgtgcgaccacgttgcactcgggttcaaccaatcaaccctacttcaaaggtatcactctcaacttttttatcttcttttgttgttctgtttttttgagttttgttttgttttggcatgaaaatggtatctattttaatgaaggttccgattttttgaatgaatagataaaaggtttgccgtttaatcggtattcatggctgacgacgcataattcatttgcgattttgggtcagaaatcaatgacgggttctgttattctgtctccaaccaatcagcaggacgcgatcacaagccagcttaatgtgggttttgttctcttacatcactttccatttttcttttggaaaaacttatatggagttgtttaacttttaagctttggataaactacttgcatgatacagtataagagaaataagaaattgaaatgaatcaagtttttttcgtaaattaaatcttttaatgagatttataaaagttaattgcataaatgaaatttagttcatagtgaagttcaatttattttatttacttttttttacttttaattttttttacgtaaacacaactttcatcttcttcgtcaattagaatcacaaactttcacaaatgtttttttttttaggtatcaacaatccatatacaatagtctttcataaatgataatcgccataaattccctacattaaaaaatcttaaaaatattttttttacagaaaaagtcttaaaaatataatttatatgtttgttgaactctagcttgcatataagttttgtactgttttttttttttaatattgtcatttggttacttggaaaattttgaactcccaaaagtggaagttaagaaaaggaaaggtctttgaaactttaagcagttgtttggagatcatttgtcatgtctctcgttgtgttcattattctacttaccgggaaagtaaagcttctgctttgtgctcattgcaacagaacattaggtcgccactttctttcttttcaattcttttttaactgaaaaagtctgaaagtggttggttataaggttgcttgctgcaggataaatcgctattataaaaacttcgccaaaaattgtgtcatgtgagaatttacattttaaattaacaactagaaattttttacacggttgaatagttcaaattgctactagtttagttgaatagattagagattatgagcatgtttggatataaaactaaaattgtttttgaaatttttctattaaattttttatatttttattagaaaaactcttaaaaatatttgtgacttatattcagataggttgttaacgtgaaatgagaattttttaattttattaatgacatgcttacattgttgaaggccaccagtgacggggatagcctttatctgctttcctactaaatgtcttgcatgtgggaatttatatattaaattgactaaacaagtagtatttttttttccatgattaaatagttcaaattgttactagtttaatttgattggttaaggacatagtgtgaaacattgataattttatcttaaagaatcccttaaattttttaatgaaacgtttggaattgttggaagcacaacaatgatgaggaatgggtcaaagttcaaacatgagcaaaacagcaaagactatattttgtaccctcacaataaaaataacttcattgaacagcttggcaacaattagtcacttggtggaaattattcaccaacttttatacagattgaatagaattatttttttttaaaaaaaatacacagtacaatttacaaagagtatgtgaataaaaattgatccatttggtaagagtgagactcctatctcacaagaatatttggactcgattctctttatcgatgtaaaagagaagttatcccttgtgaatttaccaatgcttaaaagaaatctaaaatgatttcagttcaagagctttggaagcttaattatgcttacattccacatttctctcgcagaatggagtacgagggttgatgcttgacatgtatgacttccggaatgatatttggctgtgtcactcatttggtggccagtgctacaactacacagcttttgtaagtaaaaataaatggctcatttattgttagggttgggaaaaaaattcatatccataaaataatttatatttaatacaatctaatccattttaaattcatttaaatggattagtttcatatctaaatccatttttttattttaaatctaatctaattaattgaatatgaaatggatatagatttgatatttgtttgaatttttaaatctattttttgccaacttttattgagactatttttttgatcgacatcaattaatgatgattttaagtcgtcatcgttgaacctatttttcagttaatgttgataaggttttttagtcaacattgattgagattattttttggtcgatatcagtcgatgcaatttttttgccgacgccagctaggtttttttgtcgatatctatcgagattattttttatcgacatcaagtaggtttttcgctcgacgtcgactatgattttttttgtcgacgtcagacgaaactattttttggccgacatcggttgaaataatcatcggccgacatcagccaaaaaaactagttgacgtcggctaaaatatttttccaattgacgccgatcaaaaaaatcctagttgatgtcagcaaaaaatatccctagctaacgccagccaaaagaaatagtcattgttaatgttgaccaacaaatctagttgttgccaacaaaaatatactttcaataaacatcagcaaaaaaatctagttaacgtcgacaaaaaaaaagtcgtgatgaatgttggcaaaaaaaatcaaaatgatcgacattggcaaataaaaaccttatcaatgttagtcacaaaaatcctaactaatgtcagccaaaaattagtcacgatcgatgttaatcgaaaaatccctagtcaatgtcgaccaaaaaatatactgactaaaacttatggtcgatcttaaccaaaaagtaaccttacctaagatcaaccaaaaatatcattaaccaatgtcgactgaaaatgtactaactaatgtaagcaaaaaaataatcttggttgatgtaggtctaaaaatgtctggaccgatatttgtcgaaattgctttggttgaggtatgccataaatagcctaaccaatatcaataaaaaaatagtcttgactaaggtcggttgaaaataactcaggtactaaaatttcactttttagtatttaataactaaaatttatataaaaaaaaaatcttataacatttaagtggatatatattagatatatccaaatccatttaaatggattaaatcttgaatttaaattgtttttaaaaaaatatggatatatatatttaagattcgaattcatgctcacccctagatattgttattccaaattaaggataatcaataagcaattacaaaacactatttctctgtgaccatgaaatctgattatagttttctttcaataatgaataattaatatttatctggtttgtgaacaatgcagcaacctgccattaatgttctcaaagagattcaagtatttctagacgcaaacccatcagagattcttactattttcattgaggattatgttacatctccaaaaggcctaacgaaggtgtttgatgctgctggactgagaaaatactggtttccggtgtctagaatgcccaaaaatggtggaaactggccaaccgttgatgatatggtcaagaagaatcaacgtttagtagtcttcacttcaaaatcatctaaggaagcttctgaagggatagcttatgagtggcgatatttagtagaaaaccaatgtaagtactaaaagttcctaaattttaagtttaatatggaaacaaaattattgatagagaatattaacataatctctaagaaatgattttaaacacacactattaatgactgaaatttactgctaaaaatcataaatttgcatgacccttactctttatttagtgaatatcagttatgatttttaattttctataaattttattagtactacttttgtaattgagttttgggaatgcaatttgcagatggaaatggaggcatgaaagctggttcatgccctaatcgtgcagagtcaccatctatgaacacaaaatcaagatcattagttctagtgaatttctttagagatcttcctgatgtaactaaatcttgcaaggacaactcagctcctttgcttagtatggtcaatacatgctatgaagcagctggcaaacgatggcctaatttcattgctgttgatttctacaaggtatttcaacattagccatgtttgatattcccaactcccaacttatagagtaatgatgaaagtaaacatagtaaaccttttattacattgatgttccagaggagcgatggaggaggagcccctgatgcaatagacgttgctaatggtcatctagtttgtgggtgtcaaaacatggcctcctgcaaggtttgcagcaattaattttatagtttcactccgcgaaaagaaattattacatagtctctactaatctatacttatttatatcaaaaatttaataacatttaacatataactaacaaatcattggtctgaatggaattgagtttagtctctttaagtatggtatcagatttaaattttacaaaaaaaaaaaaaacatgattgaaagaagagattatatcacaagtggatagtcagattttcttatgaatattaataatcagtaaaattaataaatattatgtatcaataacatgattataaaaaaaacgtcacataaaaattagacgagatgatatagtctaccatagtactctcactctcttaagtttgcttataatgaatttggattgtgcaggctaatatgacatttggagtgtgtcagctacctgaggctgaaaccactcctccccgtgcagcagcagcgcgtaacactagctttggtattcgaaattgcaagccagtttatttgttgtggtctttagccacctttgtttttggggctatgctcgtggcattgtgaatagacatttcccttcataaaatctaagtagaagagagtaggagaaaagaaagtgtgtgaagaaaccatttttggggataacgctgaatgtgcgtgaacatttggtgcagtgcaatggtttttgtgtttatttattttaattttgaaagacgagctttggaagctgtagttgtaattttatagtcatagtgggtatgcaaatgcaatgggctctctgaacttaatattgctaatttgttagtgtgcaacatgtggtgagggtatggtttcattgatttaacgtgcattcaaaagaaaaatatagaagtgaatttgggaaactgtttgtttatgagttgcccatccaagtaacagttattcttgcgtatatttgacatatttatacaccttgtgtaagagaagccttttattttatattccactgagattttttttaaaacaaattccaccttaagtaatgttattacgtaagaatgaatttatatgtcctataaaattataaaataccaaatacattagattggtttacttacttgtaaaaccaagattgtgttaaacatctcctacatactaatttggttgccagcataaacaaaatatgataggatacattattatatcttatttcaatctattgtcagtgattattaatgtataagttattttaggtgaaaaataaataggacaaactaaaaaaaatctcttttcattttatcattaaatcattatcaattatattgttgttattgctatcattatcataaccttcgtgttagcacaatcattatcattgttattatcatcaacatcatttcgtcatcttttttacatgttatattcatagttactattgtcatcactcaccacccctattattattacaaccaacatcattccaccgccaacattactatcatcacaattgtaatcactatcatttatattattattattgctatcattattattatcatcattatatgattatcttgttatcgttattgttattatcatcattattattatcgttattattattaatattattatctccatcgtaatcacatctttgtgaatgttatcatcatttaaacttagtttgtaacaaaaatgcttaaataaacatataaaattagcttattatatcaataagctataatcacatatcatgcatagctattcaccgaccaaattctagcccatttcaaatcccataatctaaaaaaaataaaagaagatccatcttggcatctttgaacccattaatttcaagaaagtcacatcacattttccttgctaattatttaatttaatgcacctcattatttgttttggggcaccccaagtgcattctaaattgtccaatctgaaatatacttgaggtgtaacaaaaaataatgagatatgttaagtaatatccatcttcttttcgtgtttcctctctcacctattctccttgcatgttgtgttaattgctaattctttggttgattttttaatgttccgtttgttctataaaatcaaagtaaaaataatctagtaaaaaattacatgaagaatttcttgaggttacacaatgaagttgtcttcttgtgttcaattttttcactatttgttgtgcttactcacctctagctcttggcccacttctactataatgtactagtagttgtggtggtgagggtcaagtctctttcttatcaacattttgaattgttattgttatcatcatctatcttcatattcattattatcattgctccttcaaagacatagatgataatttgatatcattgcttcatatgtgaacaactgaacattgagagtctgtgttcatattggtggatagcatagaagggggaaatagaatggaaggaaaattgaggcacatagctagtgaaactatgcactgtttctggcatataagacaaatccttcaacttgagtttgagggttaggcatagaaaaatgttttgaggtttgaaaatgtacttgtttagcatattgttgatgtgcttgtgtcaatgtagtactgcagcctacaagtatgcatcttattaatttttttaatctcctactttttgcatcatgtgttgaattcccctcaaatagcacatgttgccgaattttgtactcttgcagccaacgcatctgtttagtcttcactattcaaccacataatctaaagaatgataaatgtgatactattggataaaaatgacaaatgtggtactataaccaacattgcagtggtgctgcttttgttttgaatccaaaataattaggactttcatataatgcatttcttgaaaaattgtgttgtaaaaatggagatgaagaactataagttgtacttataatttaattgagtactatttctttgtttaaatgtgtgcctcgtactcttgttattattcacaaacatcacttacattatctctaataattggatggaaaaatatgtttttggtatatttaattttagttaaacttcttaattttgatttatgtacttttaaattgatgaatttattcctccaactttatataatatgtatgaatttaatcttgcatcctattttgtaacagtactaaatgttaagtttaaaaaggaagagaaactaaattcaaacattttcaaaagttgaaagacaaaattcatcgatttgaaaatagaagaaccaaaattaaatttaagtgaaggtatagaatttaaagcacattttttttttaataatttaacaacatattacaaaaaaattgtgtgacaacacttttaaaatataaataaaagagttatatttctccattaccaatatacaaattcatatttttatttaataaagtaaaatnnnnnnnnnnnnnnnnnnnnnnnnnnnnnnnnnnnnnnnnnnnnnnnnnnnnnnnnnnnnnnnnnnnnnnnnnnnnnnnnnnnnnnnnnnnnnnnnnnnnnnnnnnnnnnnnnnnnnnnnnnnnnnnnnnnnnnnnnnnnnnnnnnnnnnnnnnnnnnnnnnnnnnnnnnnnnnnnnnnnnnnnnnnnnnnnnnnnnnnnnnnnnnnnnnnnnnnnnnnnnnnnnnnnnnnnnnnnnnnnnnnnnnnnnnnnnnnnnnnnnnnnnnnnnnnnnnnnnnnnnnnnnnnnnnnnnnnnnnnnnnnnnnnnnnnnnnnnnnnnnnnnnnnnnnnnnnnnnnnnnnnnnnnnnnnnnnnnnnnnnnnnnnnnnnnnnnnnnnnnnnnnnnnnnnnnnnnnnnnnnnnnnnnnnnnnnnnnnnnnnnnnnnnnnnnnnnnnnnnnnnnnnnnnnnnnnnnnnnnnnnnnnnnnnnnnnnnnnnnnnnnnnnnnnnnnnnnnnnnnnnnnnnnnnnnnnnnnnnnnnnnnnnnntattataacaagttagtatttttttatacttaatattttcaagtcaagatccagaaaccaatccttcaaaatattgagaatctgagattcatttaaaaaaatttaacttatcctaatatgttctcttttatacacaaaaacttgaaatttgaaccattggccacatgcttaaagaacttaattttgtgttattataacgcaacatatagatctatattgatcattttaccaacttagaatgttattaagttgaaattctaagcatgttatttaaagatcnnnnnnnnnnacccctttttatttaaaataaataatttgaacaaaattttacaagatattataacaagttagtatttttttatacttaatattttcaagtcaagatacagaaaccaatccttcaaaatattgagaatctgagattcattttaaaaaatttaacttatcctaatatgttctcatttatacacaaaaacttgaaatttgaaccattggccacatgtttaaagaactttaattttgtgttatcataacgcaacatatagatctatattgagcattttactaacttagaatgttattaatttgaaattctaagcatgttatttaaagatcattttgtgttattataagttgaaattagtaaaaattgttttctattggtagcaacttagaatgttattgtaacgcaacatatagatctatattatcatttttactaacactcaattcaatttaattaaacttacaactgattatttaacaattaattttatattaacaacatatacacaaaagagtaataaaatttattaatgctggttacatataaacaataaacaaaatactatttaacatccaatgttattgataatattcaatttagttaagctaacaatttattattattattattattagaatagtttaatgataataaaatgctcaattttgtaagaatgggtagtttaattattttatcattactaagacatttaatttgatgatattaacaatttactatagactggacagtccagtaggtacttcacgggctgctctagccagcatggtccattaacaaagaagtaatataaatacaagggaattgttattctaaacccatgtattgctattctccctttccccatggatacaattttatgaaacttcaaaaataccctttcaatggaaatgtcagatgtttccattgtattgtttggggaaaagaaacatgtataaggaaaatatgattttgtagtacatttgtacaaccaaattgtgtttatgttgtaataaaggggtgtaaaaaataagaaaaacgattttattttttgttttattgaatatactataaaattgtgtttcctttacatattttttttgacacccctattttgcaattaaggaaagaattatgtgtatatttaataaaagaaaattgtatttccgtgagaaggatgcacaacatacaccaaatttcatttgacatttttgaaattcaattatgaattagaccattcgaatccctacggaatactgaattcacttccaccttttcataaaacaccaaccatgtgcatagaatttggggtataccaccatttacagaactttcagacaccaaacacatgtcaaacaaatatgtacttcaattaaatgatgatttaccttacaaattcactgaaactagaaagggtcattcaaacgattgataaaacattcaatgccaaacccaattgtgaccattgttcatccatacatacaacaatgttcaacaaacttcagcatcttctcagatattgacgcaaagcggttgcatgacattgtgctgctaggttctcgacaacacggtgctactcaaatcttgatgacatagggtggcatgtgcgatgtgatgtggtgcaacgtatatctcatggtacaaggtgactggtgtggcactgcttggaactttatggcagggcagtgttgcttggtagacaatgttaaggggtggaaagtcagatgagaaggggaggagtgtaaggatttggtgagagggcaaaatggagattctatgttttctaaaaaaggttggggtgaggatagtaaaagttggatctgagaatagaaattccctaaatataaaagagaaaataaacaatgaccgagccttcagaagaaaataaactggaccgaattcaaaattcaatttcagctagaaaaaaatttcaatttatgattaaaaaaggagttgaaattggaaatagcttaaagatgaagacaacttattgctagtaaaattggtggggggttgaagttttagaacattttagaggtcttaatcttaactcttaggttgagttgttcgcaagtatgctatgagtgtttccttgaccccaatttaggggaactatccctttatcctttatttttttacaccaactaaaaatgtctatataataagaccacttaacaaagattatttttattgggaataacccaagtcccatatcgactagagatagtgccaagtcagagtatataagtggaaaataatcctcatcctatgagctagcttttggggttgagttaggtccaaacccacattctaagttggtatcagagcctattctagatccattaacgggccactcaccatattatccacgcaccaagccctaaagtgttgggcgttcatcatcctatgagctagcttttggaaaaaaggggatccttggtcccgacttccttaggacctataatatataatagagaaaaatatatataaaatatatttttgagttgatatttacttttaaaaaaattagtgaatcatattttaattttttaaacttttatttatttaataattatttattaggatttaaatttttaaataattctgtataaaaaatttaactcctttaatacatttctaaaccagtcatgtgcttccatacaaagcttaaatctgaaacttaagagatcaattaataagtatcaagtaagtcacccattgtaaataaatctatatcttatgacttatgtcatgtatactttgagacttgagagtacccgtctctcttatttatttcatgttagacatatttcgtaaaaaactaaaaataaaaattgattaggagttgcatcaccactcatgcacacgacggggcatcattttcttctgtgattggatgtacatttccacttaagcatgctttaaatgcacgcccatatcttatgacttattatagatataaatataagccagagatgcattaatttatctgggaaaattttcattactagattcaaactttgaccgcaactgaatctaaatcggctaattacaaaaaataataataaagaaaaatctgaattggctactaccaccaatctttacttatgtaatttcaggagagattattaacattctaatttgtgtatttacatttcttatttttatttattttcattttatccttatttaagttttttaaaatggacttaaatcatttaaattcactatttttatttcatatgtaatatgtaaaatgtaatactaaaaaaaaggtgaaaagaaaataaaaataaatacattttatnnnnnnnnnnnnnnnnnnnnnnnnnnnnnnnnnnnnnnnnnnnnnnnnnnnnnnnnnnnnnnnnnnnnnnnnnnnnnnnnnnnnnnnnnnnnnnnnnnnnnnnnnnnnnnnnnnnnnnnnnnnnnnnnnnnnnnnnnnnnnnnnnnnnnnnnnnnnnnnnnnnnnnnnnnnnnnnnnnnnnnnnnnnnnnnnnnnnnnnnnnnnnnnnnnnnnnnnnnnnnnnnnnnnnnnnnnnnnnnnnnnnnnnnnnnnnnnnnnnnnnnnnnnnnnnnnnnnnnnnnnnnnnnnnnnnnnnnnnnnnnnnnnnnnnnnnnnnnnnnnnnnnnnnnnnnnnnnnnnnnnnnnnnnnnnnnnnnnnnnnnnnnnnnnnnnnnnnnnnnnnnnnnnnnnnnnnnnnnnnnnnnnnnnnnnnnnnnnnnnnnnnnnnnnnnnnnnnnnnnnnnnnnnnnnnnnnnnnnnnnnnnnnnnnnnnnnnnnnnnnnnnnnnnnnnnnnnnnnnnnnnnnnnnnnnnnnnnnnnnnnnnnnnnnnnnnnnnnnnnnnnnnnnnnnnnnnnnnnnnnnnnnnnnnnnnnnnnnnnnnnnnnnnnnnnnnnnnnnnnnnnnnnnnnnnnnnnnnnnnnnnnnnnnnnnnnnnnnnnnnnnnnnnnnnnnnnnnnnnnnnnnnnnnnnnnnnnnnnnnnnnnnnnnnnnnnnnnnnnnnnnnnnnnnnnnnnnnnnnnnnnnnnnnnnnnnnnnnnnnnnnnnnnnnnnnnnnnnnnnnnnnnnnnnnnnnnnnnnnnnnnnnnnnnnnnnnnnnnnnnnnnnaaaaaaaaaaaaactagagatgtttgttgtttgatgactatctcgcgattacgtttaattttactacaactaataatatactactagtaacatttaattattcaaattctatgtttattatcttacagtgattttttttcatttatataaaaaatagatacatatattttagtttataagtcataatcatattactaattaaaaaatagagtggtatatatacgattatgctttcattttatttataaaattgcattcaatatttatataaatagaaaataattttgtctcaaatttagtttttggaaatttattgattgaaatattgaatggtgtctttatttattggacaagctattaaaacattttttatcaatccaatgttgtccctcatgtagatgtttcttgttttatgaagatataaatatgaaatgtattttttttgctttatttttatcattttctaagtataatatataaaagtaagttaatttaaattattttaaacttgttgcaaataaaaacttgagaataaaaataaatttaaaaaatatttttagaaaaaacagaagtatgaataaatatgtattgtaatgcaactggccaaataacttcttccaccttctaatatcaaattagttcattcttgattattgccttattggcatgcgcagttcacaacacgccgtcgagctgtagacccataaaatctttgcatttcttaaatatatactagttaatttgcagggctttaatatatgtagtatagtagtatattgtatatataaatccattgattaagttatacataaatggcattgctaaatgctaaaaactgttgcacctcaaagtctggccctggcgttagagtcagaggtcgcaattgaaaaaagaaaagatggacgatattaggggaccacgcaccaacccacaatattggtttatactttataattttttgttaattagtatcttaaagtattaattaagaaattaaaataattttttctattgagaaaatcataagataacgttaaaaaaattataaatagtataatttttacatcttaataaatatatattttttcgttaactaatgtcacaagcatagtgacatggttatcatttgtcatattgtatatatgctatattctatgaattgaaagtaggaagggtttggatttggactataaaaaaatacagagtaggagggtgaacacgtggtgagcaaatgtatgaacagagtggaaagtgagttcaattattggtcaaaagattagattagatatttggtcttaaaaaattactagcacactagacgaatcaagcattaatattattcttacttagggcgaatcgcaaggccaactaggctttgcttagtatttttctctccagagactttccatgcatgggacatggtgccattggaaatgtctccgtaaataacattcatatagcttctctcttgtttttttttattgtgtcatagcttatctttgttatttattggaactctaatataatatatggggtaatctatttgtaaagtgaaaaggcatctagattttatagagttcactaatgaatcatgagggcaagtcagcacattgatttgcttttccggcacctcatccactagcatcactttaactagaactagggttaccattcgtgatatatattcattaaaattacctgtgagtaaaaagaacagaactaagttcgccacttcagttcatatttcacaaatttccagtcatagctagtgcttaacttttcaatatatatggtgattaagctgtgttcttcatgggaggtcatttgagcactgtgccagatttatttatagggaaaccaaaggagttaacgaaggaccacaccctactttttgtatcataaaaatagtatcaattgaatttaattaatttctaaaaaatataaaatgtcgacctcacttgttgatcgcgtccgccatgtgtagtttaactaactgccaaatcatccaacaaattttcctacctcaatgaaggcaatattaaggtctatgtgctaccaggtaacattcaatgttttttttttttcgtcatccattttcctcattcttcgacttatttgagcatttgggtgtttgtacacagttgcgctcttctactatatgttgtcaattggaaattgtcgaccccatgataggacagggtctcttatgtacagggtgttaccctaatcattgaaataaacaactttgaagtggtgccaatcacacccgggtcgattgatcaacttgaaaattgattgttgtgctttatgtaacatcgattgtttttctaatgtgtgttttaagtgctttaaaataattacaacgatgaatttaaaattattttcataaaaaatgtaatgaataagcttttagtgatgtttagtataagtttcaagggaagattctactgtaatcaggtctgacttgtgaactaacgatgtatgagcaaactagaaaagtgacaaaatagtcacatggatttgtttatggttagtcaattctaaccataattaaaatgttgtgcatgttgtttgagcgttgacgattaaaaataatagtattttaatttagttacttatgaattaagagagccaagcttgctattcactaagtacaacaagagttttttggatttttttttaataatttgtgctaaacgcgacgaaggtgcattgagtgtgagactccctataactgtagagtgctttagggtgttctagtcctaagcatgcaaaattgctcgtcaagctccaaagtcccatggaattatgtctaatgttcgagttcgcacaataagaaacaatattcctactctaagtgcgacgaaactctacagagttaaggtttccaccctgtaatataaagcaaaacgaaaaaaaagatatccaaaaaaaaaattaatattgccaggactatttaataaaaaaaaaacaatttaaggacaacaacatgtttaactcttttctcttgttcatttatttaaattttctttaacttttatactaatagcgtgcataaaaattcattaaatatgaatttccaaaagtattaaaagatcactcttccatctctaaaatcgagtttattatccatgggtaggttaaattaaataaaaaagaccaccaagtgtatgaatagactaatattagattatttcatattaactaatggtctcaagtagtttgagatttggatataatgttaagataaatacttgaaggaaaaaaattacaatccatattaatcataatatccgactcaaatgaaaatatctttaataaaaaatacatgtagtccataaaaaaaaagtacatgcatataaaatagttagattataatttttttaatttagtgaacaaggtattgtcataaaatagatttaataatatatataaagtaaatatgtatattgcaaaaataatttttatataagtggatataaattgtttatgtgaggctaaaaaaaatttaaattaattatataaaaatattttaaaaaaaaatttattcaatgcataatttttcagtaatttaaagtatttaagagcatttgttttcccttaaagaaacagagtatttgtttaaaaatactactatttaagagtatttaaatgaaatatttttagataattatcctttgcaacttcacgtttttttttcattttcaatcattaactgaacgatagaagagtatttatttcccatgcttcactcatttttctctagttaatttttctctcaacaaagttctggattcttagtccacaattgtcaatacccaagcaagcatttgggtttcgataaggggtcgtgttcaccaatagcactattctgtggccatcaacacaaaaccaatgtttttaataaaaaagtttttaaaaaaaatataaaaaagaaatatttattttagttcctaaaaatataagcctataataaattggtctttataaaataaaataaaatattgtcaaaaaatacacaaaaaagtatgataaattaattctgtaattaaatttataaaattattttattattaagttataatattaaatgatgaatctgataataaattataatttttaaggatcaattaatattaaatcataaaatttaaaaataattaattataatccataaaactaatctgtcatattacacgttataagatgatgggaaagagagtgaaaaaaacaggttgaaagacgtgcgatgaagggaaagagaaagaagaagagagtgggttttggaagaagctgtaacggcaaaactttgccgggttgaccggggacaatagggtcatatacccttggcgtccctgcccctgcccctgccctggaccgcatttgtctctccccccacgcgtgcgtccaaatccactcatccactttcatacagcactacacaaaacatgcaatgtacttaccttcaacctaactctacatacacttgtacactctttatttaatggatttcattttctcatatgttccctccatcttcttcttcctcttcttcttcttcttattattattatactcctcaataatcaaaaagttgagaagcataaatgatatgtagccattggggttaaactctttcaatgtgtccagaaatttcagtgataatggaaacaaaatttgtaaactttttaagaatcacacattttttttatgaaagaaaaatatgtttgagtcaagataaaattattataaataataaaattttacttatttgagtattaaattgagttgcatatttaataatcacattcaaaatctgaaatagtagaaggaaaaaaaacttatttaatcttgattttgttaaaccttttttggaatggaaaggtagaatataaaacagatgtaaagctagtttattaacttttaaaaataaataatgaaattaaacttaaattatttataactatttatatatttttttctctaacatgcattttagagataatttgtttgagatagataggatcactaaaagtaagaagattcttcatctaaatatttaatacaataacatattcatgactcaaagattcaatttttttactaaattagaataataatttactggttttttttatatatatatcttaagactacacgattttttaataaaaaacattggagataatataacatgtcacaataaaaattatcacatgataattcaaattaatagtaaatatttttttttaannnnnnnnnnnnnnnnnnnnnnnnnnnnnnnnnnnnnnnnnnnnnnnnnnnnnnnnnnnnnnnnnnnnnnnnnnnnnnnnnnnnnnnnnnnnnnnnnnnnnnnnnnnnnnnnnnnnnnnnnnnnnnnnnnnnnnnnnnnnnnnnnnnnnnnnnnnnnnnnnnnnnnnnnnnnnnnnnnnnnnnnnnnnnnnnnnnnnnnnnnnnnnnnnnnnnnnnnnnnnnnnnnnnnnnnnnnnnnnnnnnnnnnnnnnnnnnnnnnnnnnnnnnnnnnnnnnnnnnnnnnnnnnnnnnnnnnnnnnnnnnnnncattttattcccataatctcattgattcattcatgatccaactatataaataaatagcaaaataatactgaaaatttcataatatactctatttgatttagtacttcagtaagagagatcttttcaatattttgttgtctaaatgcactattttgagaaatcttgaaataatgtatttctccattcatatccttaaatcaaatcgtatatggaaattaaatcaatagctaagaataagatataccctttattattgtttgacttttaatatttattaattaaatttaattaaannnnnnnnnnnnnnnnnnnnnnnnnnnnnnnnnnnnnnnnnnnnnnnnnnnnnnnnnnnnnnnnnnnnnnnnnnnnnnnnnnnnnnnnnnnnnnnnnnnnnnnnnnnnnnnnnnnnnnnnnnnnnnnnnnnnnnnnnnnnnnnnnnnnnnnnnnnnnnnnnnnnnnnnnnnnnnnnnnntatgtgacatttgatttgaagagtttgaaaaacatacttcaaaatcttacactttgcttattgacaattcatatcaacattattatcagtattgtgcaaccctttccaatgagtgaaaaattggattaaattaataccaacattattatcagtattttgaatattgagcaaccttttccaatgagtgaaaaattggatcaaagtaagttaaactgatcgcaaaattatgaactaattatatttatgattttaatattattcaagaaccccagtcnnnnnnnnnngtgacatttgatttgaagagtttgaaaaacatacttcaaaatcttataatttgcttattgacaattcatatcaacattattataagtattgtgcaaccctttccaatgagtgaaaaattggatcaaagtaagttaaactgatcgcaaaattataaactaattatatttatgattttaatattattcaagaaccccagtcaaaaaatattattcaagaacaacttacttataaatttaaaaagttaaatcaatttaatgttgatgtaaagctttcaatgtctgaatatcccattcaattattaaaagattgaacttttttctttgatttgtttgctgattgtgtacactttttcttcattaatttgttgaaatgtccgaagaccatcgacataaatttcaatggaaaaacagtaccgggaagactaaattgaaaatttagaaagaaaagacaagtaataaacagtaaatactgtttaagagatgtttcgtcgataatagacattaatgttggggaattttgaaatattaacaaaataacaaaagtttgaaaaattgccagccattttgtttgggtaaagctaaattgagaattgggcttaattgttaccagaagtatcagtatcatttcttttatatatccttaagaattaaatatattatcatcagaaattttcaacacccatacacttattcaattaattaagttaaatctcttaacagtctataatgtatgtatgatggaataaattactccccacatcttaacccacaaataaattaagaaataggatagattactgtaagatatttatgacattgataacccataagtcttcttaaccattattcgtaagatattaattattagttaaaaattaaagaaaaatatttattaaaaattataaaataaaaaatcataaataatataattttatacatttcaataatttttattattattttagttatttaatcaatataataaagaaactaattaattaacctttaccaataaaaattaaccacccactccaaaccaataaatgctccccacctctactcactctgtctataaatgtcaacacaaatacattacaaaaagaaagagaatcgattcatccctgtttgaaaatccccaccaactttctgtaatccttgatgtataatttccattctagccaaaccgaccttgtctctgcattaaaattgctcagcttaagcacccatacatattgagaaagcataatgaaaagttgccagccatgaaacagcatccatcgtatccttcaaaaaacaaaaaatcttaacaaatgtcttaaaaaaactagtttaaatatatttttaatcctttaaatttaagttgtttttgttggtccatcaaatttaaaattatttttttaatccttcaaattcacaaaatattctttttagtaattctttaaagtactagtcaaacataaaataaaaaatttataatttatgcaaaattttgacggtccaaatttaattttttatttttattttaaaatatatttttggtgttaaaaatgacataatcaagtcaataaaaaaattaaaaattcattaattgctttaaaatataaaatagaaatttttattgccttgattatgatcatttcaaactaaggaaaattatattttaaaatataaaataaaaaataaaattttggcaataaaaatataaaaaattgtgaatctcttctttttttcttttttactctcatagtttatcgaagaacaaaaaaagtattatgcaatatactagaaaaataacttcaaatttaaaggattgaaaacataatgaatcacaattaggagactaaagatatatttaaactaaaagacaccactatttcaaaatatacatgaataatgataacaaaattattatttgatgcacgcgaagtaaaatatccatcagatatccttcaaattgttcagttttgttagatcgacaaatcagttttgggaaggttaacctttaatataaacataaggtcagaagactatctatctaggccatagtcatagattataacgaggaatttgttattgacctcaaatgaaaatttctgataaaatgctgctgagaaaaaaaattcgttctaacaaaatatagagcatccacataaaatacctaccaaagtaacacggcaaataaataacaaccattttagagtgtgtttggtttaaatgataaaaatagaaaaaatgaaaatagattttttaattaaagtaaaatataaaaagtgtgaattccatataaaaaaatacaatatttctcacctatattatttctttcttaaaaaacaaacacttcctcagagttgaatccttgtgctcccgagtttcacctaatattgtcatccatccttgtagccacatgattagaatcctaatcagcacaaaaaaacaccctttgaccatgcaattgaaccttgtatttctagtcaaagagttctttaaacaaaatagacttacgtttagattgaagtttggaaaagtatcttaaatattatttttccgaaaactgattttttggacataattttagtgtcaaatataattttaaggaataattaaatatgatcttaaacttattttcctcttaaatatacttttggatgttcttattaaaaatccaagcacactcttatttagtaaaataactcattttgtaccatttttctgaaatactatgtgccaaagtaccaattttgaaatgtattcgaagtaaagtttagcttctaactgaaagtatttttctctcaaacaaaaaacttaattttaaaaatttcatacacaattcaaaaaaacttttaatcttaaagaattttttatttaattaaaatttaatatttttattaaaaaaacttaacaaacagtaaaaacaaataaatttcgtaacatccattatttgtcgagagaaaaatattattcttaaacaatattcaataaaatttccaaatctcattttttataatataaaattgttaaaataataatataattaatttaaacaatctcatttcaattaataaaaatatttataaataaaaaataccattactctaaaaatgatcaaatttgaaataaattaaaatatagaattcataatttaaaaatatagagccatcaaattttaaagtttagccatgtagttaattatgtcattttctacttttttacatttattaattaatttaaatgataattaatttgttaaaaaattgtctaatttatgaatgttgaacttataaattttcaaattgcaattaattatttaactttgagtaaatctttaaagattgttgaattttataatttaaatttcaaattattattagaatttgttaggttactgttttgtattattatatttaaatagaaattaagattatatcaatttattattattccataacattaggaggttgttgaactgtttatatatatatatatatatatatatatatatatatatatatatatatatatatatannnnnnnnnntatatatataagaacctcatattaaggaaaaatatatgaaagagaatggaggaatgaatgaaataaatgaggaattattattctaatcatctatctccttcttaacattcactttctcttattcctctacaaattatgattattataatcatgaacttcaactttaccccacataatctttgtgtctttggtcctgacttgaatcaattttttgcactgatcgtgcatcttattcctgattcaagcttctattcgtggtttttgcatctagttgtctttgttcgtgatcctgtttttgattcgcaattttgtccttactcgtgcttcttggtgtagttttttgatgttgttgttgctgtcattaagttttctaccatgaagcttaatatttcattgatatttggcctattttggtttattggtttcagccttttaggtttgttttgatgattgtagcttctgacttatggtggttaagcattgtttctttgtttgcttttgtccatggtggttaaatactgttttagcttctgtcatagatggttaagccttagttacttttgtcttgagtagttaagtattgtttagcttctactcttgatggttcttgatttgctaaaacaattctccatgtatgtatttcatacgaagctcgttgcattgttatgaatccttcatagaccatttttgaagtctattgacatgaacattttattgtttcgaatccgtatctcaattttctttctacctcacataaccaatcctgaagcaccacctcttgaacttattgcttatcaaagtcattcctgaaagagtgtttggagaagtaattgacaagtttaacatgacgatattcatgcaccaacttgagagagagtgctgaattgtataatttaaattttaaattattattaagatttgttaaattgttatatttttatattattatacttaaataaaaattaagattagataatttattattattattatgtaatattaagagattgttgaactatttatatatatatatatataagaatctcaaagttaaaaaatatatataaaaaagaaaaaaaataaatgaaagaaatgaagaattattattaaaatttatccgtatcttcttaattttaacaaagatgaaggaatttctgatacaggtgacacacttatcgaaccacgtacacagaagggaccacacttttgttaaggatagcaagcacccgttattgttatccacacgaaagttgttttagccacaataaataggtagatagacaacctgaacaccccactttcctttcctaatctcttcatctttgacctttgactacccactattaccaaacggttcaaaacctaatcatactctcttaacttatttgcattctgcccctttcattttgtctattttccaaattctcccttctgctctttttttttttttggtttctcacgtgttttttttctttagagataattatttttgagataatacccaacactaaacatgaatatttctttcgataaaaatttaaactttgattcatcatgtttgtgagagattaatttattctacaagacctaacctcgttagtcttatgctttcattttattcccataatctcattgattcattcatgatccaactatataaataaatagcannnnnnnnnnnnnnnnnnnnnnnnnnnnnnnnnnnnnnnnnnnnnnnnnnnnnnnnnnnnnnnnnnnnnnnnnnnnnnnnnnnnnnnnnnnnnnnnnnnnnnnnnnnnnnnnnnnnnnnnnnnnnnnnnnnnnnnnnnnnnnnnnnnnnnnnnnnnnnnnnnnnnnnnnnnnnnnnnnnnnnnnnnnnnnnnnnnnnnnnnnnnnnnnnnnnnnnnnnnnnnnnnnnnnnnnnnnnnnnnnnnnnnnnnnnnnnnnnnnnnnnnnnnnnnnnnnnnnnnnnnnnnnnnnnnnnnnnnnnnnnnnnnnnnnnnnnnnnnnnnnnnagttttatacactaccatttatcacaagttatcatataattgaaaattattaaattttgatttattactttaacagtcatctctataatatttctaattaattgcttgatagtataaatttattttacacaaatggtatgccaaaattaattaaactcttggtaattttatataaaaaaatgaaaggataaacatatcaagaaaaaatgatcatattattgatctgaaaagtgcttgtcatttttttttaaaagctaaatatttttgaataaagaagtagagcacaaggtgtgccctactcaggtaacaaagattacaaaacatttgataaagtgcttgttattaactagagcattttaactagagcgtttgataaaagcaagtgaccaaaacttgtaaatggacaaaaaaagtctatttattttagcctttaattaccggtaaaatttaaccatttgcttttcccattcacattttttcaacgatcatttgtgtcactaacgattcaattaccttacgttgtgattcttgttattggatccttttatatgtttatggcgggggggttgtattataccctattagctactaactttctagattctacccaaaaagtattggctttatgttttttcatttcattatttcaacgttttaaactctaagtttcaatcgaaattcaaagtaaatttcaatttatttcacattgaattataaaaaaaagtgtaagatatttatttaaatggttgagtgacacatgctatccacttcacattatactattagtaaaagtattgtgtttttcacaaaagggtggcaccttcctacttgattctaaattttagaaaaggctttgctactttttctttattcattgaaaaagcttttgcaagatgattaattcgccatcaaaataaacaatgatttagtcaattccgttggtgttgaaagatcgaatgagccatcaagtaatcatacacattgatctcctctacactacaaaacctttcatgacaacaagttacaatagaacagtgtaaagctttctcttcaatagccaacaatgagtgcagtagggtcaagacaacaaaaagagagccaaggaaaaaaggccatgaacacagatgaaaaagacgaaagaaatcaagaatgaaaaaaaaagagagggacaaccgttcatatatagattactaagttcgataagtacgtgttatctttgttatataaaatttgtctaagttatgaattttatacgatttcgatgaaacttattttcgaaggaaaaagaagaatgcattaaagagtgatcaacatatgaattaaaagttcaagaagttgcattcgtcatcaaaagaattcatttcgataaaaattgatgttttccacgattctattaaagtgtatgtgattttaaagcgctcaaaaacaagatcatttcgaatttcaaaatatcaattgaaacaattaatggaaaaaattacataaaaaatcatcaaataacattagatttgagtatttaagaagattgtcactatacatattgaaatcatagaatttgtccgttaggattagaagtttataaataagatctctgacttttattttcagtggattgaatcgttatcacttaaatccttaaacatcgacaataccactaattgaaattgactattagttcaagaaatcatcatatatgtattgattctcaattttaatgaaatcatgtttctctaattgactatatctttttaaactttttttttattaatctccatttgttctcgataccttgttaaaaaataagtatcaaaattcacttttacatcgaaaacattataaaagtctacttaaaagttattttataaaccattgtatgacataactataattacttataaatatttttattgaaattaatattgttatatgtataaaatattatataattctctgataaattaaaaattaaaaatttgcttgattaaaaagaatttataatcgaaaataaattttatgtttcatatttaaatatttattattaataaatcattgaataaaaattattctttacaataagagactattttagaagaataaatatagttttcacaattaacatgacaaatttgatttctcgatcatagtgtgaagaaaaatttattaaaatagataaaattcactttaataattaatatgatgattttcaaacggtaaaaatatcttacaggaaattaaaaaaaaaaagagggggcaatgtgcaaaaaagtgacaccctaacaataataataaatgaaggaggggaaaagaaaatcaaaaggaggacgcaattagttgatgttcacaggagtaagattttagggcagcaaatgtgggacccacaagtggcatatttggtttgaccaaaatccccctaccccattccccaaccagggttagattccaagttagatgccatgccatgccaccacacgtgtgggagaagtcagataaggggcagagagagagagagagggggtggcaggcccagtcccctctctgtgcctgttgggtatgttcctctgtttcatctcatatataagagaaagcaaagcgtgacatagctaaagagaatttgcagagccttcagatttagctacctctattatcattttctttattattattattattactcattactcatttctcgtacgaaatacaacacatcactctcttctcacttctcttcttttctcttctttcttttcccattacaatgcccgggagtttagaaccgttggatttgggtgttcacataccctaccacttcagatgcccaatctcgctcgaactcatgcgagacccagtaaccgtctgcaccggtcaaacctacgaccgctccggcatcgaggcatgggtcagcaccggcaacagcacgtgtccggtcacacgcgccactctcacagacttcaccctaatcccaaaccacacccttcgccgccttatccaagagtggtgcgtcgctaaccgcgcttttggcgtcgagcgaatcccaactcccaaacagcccgcagaccctgccttagttcgctctctcctcaaccaagcttcttccggttctgcccctgctcacctccgcctttcttcgattcgccgactcagacaactcgctcgcgactcggacaagaatcgttccctcattgcctctcacaatgttcgccagatccttctccctatcgttttcaacaacggctcgattgagttgaaaaacgaatcgctcgcgctactcgttatgtttccgcttggcgagtcggaatgtgcttcgctcgcatctgattcggtgaagattggctatctatcgaggatgttgacgcataactcgttcgacgtccgagtcaactcggccgcgttgatcgagatcgtcgtcgccgggacgcactcgccggagctacgcgcggaggtgagcagtgtcgacgaaatctacgacggagtggtggatctgctccggagcccgatctcacacccgcgcgcgctcaagaccgggatcaaggccttgttcgcgctttgtttggtgaagaatacacggcagaaggcggtggacgccggcgcgccggcggtgctagtcgaccggctcgcggacttcgagaagtgcgacgcggagagggcgctggccacggtggagctgctctgccggattacggcgggatgcgcggcgttcgccggacacgcgctgacggtgccgatgctggtgaagataattctgaaaatctccgaccgcgcgacggagtacgccgccggagcgctgctctcgctgtgctcggaatcggagcggtgccagcgcgaggcgttggcggcgggcgtgctgactcagctgctgcttctcgtgcagagcgattgcacggagagagcgaagaggaaggcgcagatgctgcttaagcttcttcgggattcgtggccgcaagattccatcggaaataattctgacgattttgcatgcagccaggtcgttgtggttcccttttgaccgtttttaatttttctccactagtaataattatagtggaaaaaaattgtttagatttgaagaaaaagaaagcttaattagagagtctttttttttgtttagattggtaaataaatacatctgtaatgtaattctgtatttaattatttttctttcttctctttgtttttgtatgtaacgattattgtgaagaacgaaagcaaaaatgtttcatcagggagttgtaatttttgtaagatggaaaaaaaaatcaaaatagagctaacttttgtttttttttaatttttcttttctcttgctttgtttcaactttcgagtgatgtagtagtttgtgtttaggaatgtaattatgattgaattggttggttatgagtattatttgtgaatctgcttttgcatgtggaaagcttgtggttttatttattgggtggaaagaaaacattcactgccattcggtgaagtacacgtttctgttagctccatagacggaagtgtttttgacttcctaggaacatcattttaaataatcattatgttggtgactcctttccatcgttcaccaaagaagaaagatagtagagtagtacctttttttcttttttttaatccatctttttattcttttgtacatcaatttcgaacgttgttccggaccattctgcgaccccaactggatttttatttttctcgtcttaaccctgtgaaaaatgatactagatgtggattggatagggttgaattggaatctctgaaaggcaacctcaaacttatttgatatttgacagagaaagtgaatcaaaaaaacaatattgacataacagaacacgataaaaaaaatgtgaaagtgaagctacagttgctgcattctaatggaagggctatctgtatgggccataactatcaacttgtagctgaatagcgtactggtctgtgactacgaagtttgagcaagaacaaaacagagagaacagaaggggttgcacgggtttgaaacgtctttgaatgaaaaggaaaagaaggtgcacatgtgagggaacatggtgggccccagagggtcctactacaaggactgggaaaaaatggtttacgctgcttacagatactttttttttttattaccaaaaatttaggtatgctggatttggagacatttatcaggtattagagtattctttaaggttcattgagtgttcataaaaatacttatcgatcacctatcaataatatttttatattaacagcgagatttgaatcacatttttatgagatactgattcttatcaactggatccatcgtttttggttgtggcttacaaatactactactggtattaggggtgtggtcacatgttggtgggaaatgggaatcaaatattggtgtcacatgggtgcatgggtgcttgcttatttgttattttctgcagcccctttttcaatttttgtgatggctattagtctattactactactactcacacatcacatgcccagaggcccaactttgtttctgagaatttattttgtcttcaaactcagggtatgtaacactagggacccatcatctactgtcaccctttttagctttttctaattatcttttattcccccttttgggacaccaaccagtaccactcaatttttcttctctacaaggtgaaacacgtcacctaagggatgaggtgattggggaacctttccatcgagttttcaacaataaaagtattaagttcccttcaagtcagagattgtttgtatgtgcactgtatgtaaagaaacaaagtagggtgggatttcattcatgaatcatgattcatttgtgccttgctgcttttggtctgtctccaagaaaagaagtcaaattgatatttacattgtttcccttcttagatagtatttggtttaattacacttgaatgcatttgaggtgaaagttttaaaaattgatgttggtctaatacatttacattctattttaatttaaatatttcatgttaatttacttttagacatgtttcattcctttaaaccaaacagactcttaattggaggatgatatcattgatgcttgacaatgagtctgtttctgttcattcgcgtgcatggtatgttgttttcagcagtcctacagtacagttgaagaatgctttctgcagacaacaatccatacacattgcaataagggtcttcgtcttatggtgaccaataacgactactattactacttactgtgcatatatatgtgcatgccatattgccactttcccatgcatattgccttctcttttgcattcaaacactattggaattacaactaaagtgaataaccaaccaaccacacgtgctcttctcttctcttcattgctttggttctcaagttttctcattgacaaaaaaaagttcggtgattccagaatagggcagttcctgttttagagttcagagaccaagagtggagtactgctgttgtcaagaactatgagtgattagaaggctccattttccttgatggtgaccattgttctgaataacatgcaatttttccatctaaagtacacactgtctaatttatattttttctgttgaaggtttttgttttttgggatggaaccccatccgtgtgttataattataagacaattaccacacacactgtctgattatctggtttcactgttgattttgtgacagtgaggggagtgtgtatcttgtatgcatttttttttttatataaatgaagtatttacttgtaaaacttagaaagcaaatatcatttttaatggtgacttactgaaaaatttagtacaatttaatagttctaaagccaagcctaaaattcttgcatcgacgtgattggatgttactaaaatgaccaactagcaagaggaaatctctattgttcatttgtggtctcgacagataagactaaatttaattgggctgagctctcctctctagcccacttaaattcttaactgaaccaaattttttagccatccttagagtttggtaggaaaccattgacccaaaattacatacctcgaataacacctgtcttcgattctcataaagaaaaataactgccactaataaccgttgctaatcataaacaatgacatcaagtcaacttaggcagaagggaccaaattgatcatttgtgaaaattaggaaaccaaattgtatcgtttgaaaaattatgagaccaaattaaaccatttattaatagtaagactaaattaaacaaaattaataaatagtaggacaaaaaacgtaatcaagcaaaagaaaaataaatttattgctatgtttctctagtattcctttggcgattaagaattttggtcgaagctaatccatgtatccccacttaagtaagacactcaaaaatgggttcagtactggaactctaaaccctccccaggaacatacttttcaaaaatggcttcaaaggttcactttgtgatacttaaaccacacatatgaatcgcgtcaaagagtagatactctcgcactaatgacatcatatttggtgctattggtgccacatctggcaccaatttttttttataattttttttaaatcttggtcattatatggtggtggccgggagatgagatgacgaagacatactaatagtaatgagaataatgaaaatggtaatgatgatgaaatgattgtgatgtgaaataatgaatagtaatgatatgataatgagagtgtgttttttaaaaaaaaaaaaattcataaatttatttttttatttttaaaatgaatataaaactattttaattttacttttattgaacgtgtttcgttttaaaaaatttatttgaaaataaaaaataaaaactcgaaaccactgcggacagtgcttgattctacgaggagttgtttcttaaaataaaagtaaataaaaaataatcaagaagccgcatgtcaaaaaaacaaattataatattttttcagcttttgaaacagcgtaaatttaatgttcaagaattaaaaaaaaaaaaactcataatataggtctagatgggattctcattgtgtctccttcaataaaaggctagcccctcataaaagtgagtgtttttttttaatgaataaaaatcatatttatcttaaaattttatgtgttttatataacaatgcactttaaattcaagcaacgattgatatattttatttattgaacaaaggttcaccttgagcacgcttaaaaacccgacacatatgaaaactgatccaaaaagaaggaaaaaaaatcataatatgaaagcatttattcagttgcctttagaactgtccaagtttgggcattaaagctttctaacatgataagaatacaagtttttttttttttttatcatccttaattttaagagatcaatgagaaaatctctccagacgcatccttgtaagtctcctcagctgaattttcatctgaaacttgttttgcctacaagatcaacaattcaattgagttaaattaaactaaaccatattcacattggtctatcattgtctcctaaatattcaactaggaagcaaaaaatttaacatgcatctatgtatgcaataaaaatggtgggggatcaagtttcaaacttacatggactagaatcatgcatgtctttccattttcattatgattgcatgaaacgttggcagtaatgacctctatgttgtgcctctccaacacagaagtgatggtgctcaagaggtgtggcttgtaggccgagcaaatagtgaattgggccccattggcatgaatgttcaagaccatgtttgaagaagtccatactttgtcaaaatctaatttcttcttcccattgattaaaattgtatttgaagttcccattatttctttgaaaacatatgggaacattctcttagttattttccctagccttttgcttctttcctccagatctttaatgtagttagctgctacattaacaacggttgctttatccgcctacgaaataaaaaacataatcaaagcgtcttagaaaaacatcctaaacttcaatctggtcgttgtcttgaagtgggtattttggtatagataactctagtgacattaatgactatttatttttaatttaaaagaattccattgcagtgtaactttccaaaatttatgaaaagtattatttttctctctttagaatatttagaattatcacttgagagttctcctctaaaactattgtttaaaactgttgacttttgcccaagttcccaccgctatttcttgatctttaaataataataataataatattattattattattattattattttaaagttaaaataccacattcgtcaaagcacataataatagtttgttttcaaacaaagctataatcaaaccaatttgaaacaaatttgattacatacatgatttaatacagctagaaaatggcacaataagaagaatgcctaaatctacatccaatggcttagattgatccatttataatactattccaatatgtgtattatcattaattttaaaattatccttttttatctctttatctacttaattacttcttattaatgtttggagagagaataattaaataaaagtatgtaaaagaaaaataattaatgtatttaaaaatttagaaaaaaaatcatataaaagaagataaacaaatttctgaaataaaccttataattagtaacagaggaggaagtatatattactttcaatttccataaaattgattgaaaaaacctccctaaaaaattgtttatgacttttaaggtaaatggaaagatagagctttgtgccctttctatatttcctaacttatgcatgttggaaagggatggaaaaaagctaggaaatttgacatatattagacaaataaagttcataagggaagaaaagacatcctttaagaaagtgtataaaaactagtagaaggaaagataaatatagtcacatcattaaatgattaatatagggaaaatattcataagtaataaaataatatattaaaattcttgattacccttcaaaaagcttgacaaatgtaaatgaactaaattaaacacatacctcggaagggagttgcggaagcaaaccacgaaggttgtcaaacatttcgttattagattctggatgctttccatctaccccttcatcactagtaacattgtctttctcattttcacttgcgatctctcgatatcgcttcttattcacgagtgcttcaccttcttcattttgttggttcagtggcttcatgttgtttttactttctcccgagttatcagaattggaggaacctaatgaatggtttcccaaatggaagtccatatcatgtgaaccttgatcttctgccatcaaggtggagagaaagagaaatagaaagaaagtgaggctaagaggtttggttttggggttaaggaggaagattggagaatggtacatttatattaaggtgacaaactttacgaagttgcaaagagaaaatataaatggtgagaggctaagaacaccccaattttatattattttttttgaaaaggaatgccggaaatcgtgttactttgcatcctaataaataatgcattaaatatatagtttaatacggtgtacaagaacatttcatccccaacttaccaacctcccactgcatgagaaaggcaacaggacgggttggggggcgagtttgtctatctccattttcataaaagacaggcacgttcggatttataaaaaacgggagtaaaaaaatgaaattcaattctattctcgtcaagttttatcgaattagagaaaattaatgagaaactcatttatttttttaaaaaaatatatttgtttatatattttaaataaataatagattaaattattaattatattttaattcatttattatatataatttaataaaaataaataacataaacatatttaagaattaaattacattttagctaaatgtataatttttaaatttgttataattatagtattatttatttaattattaaaataattattctatattttaataattataaataataaaacatgaaaataattatataattaataattaatataataatagaattatatatagatatataattatattattaatagttataaaaatatatgtaacgaagtggatacgagaatgggacaatgaaggacatatgcaaatctaaatccgatcaacttccccaagttgggaaaaacctgatcccaacttcaaccccaatcaaagtgggtttttttttgtcaaaattagggcgagtcgaacagaaatccacatattcggtttttattattatgcctattacatggtgacctcactttctccttagaaagagtttggcttaatttatttcatttttataaaatatataactaaaatttcacataaaagctaattaacttttcttgatataaaatgcaatttaataaattctagggtaaataacaattttcctctctaaatgtgtagagtactaacaaatttgtcctcgaaagatgaaaattcaaatttttgttcttgaaagtgaaaaaagtgtgataaatctattcctccatttacttctgtctgttatcgttaattgaaagagtctaagtggcacattcagggagtcagctctacacattcaggaacgaatttgtcaactctctacctaaaatataattcaatcttcatattctttcttttttaatcattgcaaatataaaattataataaacacctaaaaattaggaaagcaagcataagttaaaacaaacataaaataataagtataatattgattaataaacgtaatttgttagttgctttgaaatttctattgtaacaacattagataatgaaaaaatcaagttgggtctcatttttttttaagaattaacttaatggttgtaaatttttgtttgagtctcatattttgggtaaggtactgtcacaacagaaattttaaagcaaaaatatgagataataccttatcaaaatatgagactcaaacaaattaaaatgtttatttttcaacagatgctttatttgcctacgaaataaaaaaaaattgttttgtagttcaatgcttcattgacaacaaatgctttatttgttggagtttatgtttaaaaaattcatgggttatgaataagaggtggttggaaaaaggttagaaaaataataactactctcaaccgctccaataacgaacagtcgcgatgattcgaaaaataataactactctcaaccgcttcgatatcgaatgattacgatagttcaccgcttcaacatggttgtttgttgtctatatattgacacagagacaatcagaaaaatagatagaaaaatatagtagctttttctgatcttttcgcttacatgtatcacataaattcttcattctttgtgtgtggttcctcaagcattcgctatgttcgtttgggctattgattggtagtgctatcgatcttcagacgttgatccgttctatcctgggaagcaattgttcatcaacctttggcatcaattggagggtacaaattgtcttaaggagacaaccttgttaggctcaaatcctttcatctctctgcatctgtatctgtttcatactcatcacacgagttttgtttaaattgttttgtgcaattgtagtagattatattgtccctcttgactactcagattctgacccttgtgcaattgaatgtattccaattctaaagtattaattattaacaacaattttaagacaatttggtttgaatctgggttcagtatattctatctttctgtattatatattgttctctattctttgtaccatttaggggtaataatatttattacttttattgatgattgcagtagatactgttatgtttatttacttaatagtaaggatgaagcacttgtgacttttagacaatataaaaatgaagttgaaaatcaacttaacaagaaaattaaggctataaggagcgatcgtgggggagaatatgatggccccttcgaggaattctgtatagagtctagtattatacatcagacgactgctccttatgcaccgcaatcacatgggattgcagaaaggaaaaatcgaacattaaaagaaatgatgaacgctatgttaatcacgtctagtttaccatagaacttgtggggagaagtcattttgacggcgaactatattaataatagagttcctcacaagaagacaaagagcatgccatacaaagtatggaaaggaaagcaaccatccttgaaatacttgaaagtgtgggggtgcttggctaaggtcgcggttcctaaacccaaaaaggttgaagatcggacctaaaatcatggattgtgtattcattggttatgcacttaatagtagtgctagtcgatttttggtttataaatttgatgactcaaatatacatgttaatacgattattgaatcaagggacgctaggttctttgaggatatattttcgtataaaaaggtatatgaaccaagtggtaatgacaatgataatgttgtgagacctcgggagactacaactagtgttgatcctgtagaagatgaacctatacatagtaagaggcaaaagaccaccacatcctttggatctgattttctaacatatttgttagaaaatgagcctcagacgtataaagaagctgtaacgtccccagaggcaccattctgggaagaggctatcaatagtgaaattgaatccatcctgtcgaatcacacttgaaaattggcagaccttcctcctgacactaagcctctaggaagtaagtgggtcttcaaaaggaagatgaaggcagatgacactattgataaatataaagttaggcttgtagtcaaaggttataggcaacgtgaaggttttgactacttcgatacctattcacctgttacaaggattacatccattaggatgttagtcgtgctagcatcattgaatgggttaaaactacatcatatggatgttaagacaactttcttaaatggagacctagaagaagagatctatttggaacaacctgaagggtttgctgttccaggacaagaatggaaagtttgtcgcttaattaaatccctttacgagttaaagcaagctccaaaataatggcatgcgaagtttgataaagttttgttatctaacggttttagtattaatgaatgacaagtgtgtctatattcaaaatactgagaaagggtttgccatagtctgtctttatgtagacggcatgttgataataggtagtaataatcaaatgattaaaactactaagcaattgcttgccagcaaatttgacatgaaagatttgggaagagcagatgttatattgggtatcaaaatccatagaacatcaagagggttggctttatcacaggctcactatattgctaaaattcttgaaaaaatcaagattttaaatataactcctgtgaagaaccccatagactctagtcttcgactatcgaagaatactggcaaagctgaagcacaaaaggagtatgttcaagtattaggcagtcttatgtatattatggactgctctagacctgatattgcttatgcagtgagcatgttgagtcactttacgagtaatcttaatgtgtatcattggaaagctatagtaagagttttagcatacctaaagcacactcaaaactttggcttacattacgagaagtacactgcagttattgaaggatattgtaatgcaaattggatcaccggttctaatgacactaaatccacaagcggatatgtgttcacccttggtgggggtgatgtatcttggaaatcatccaagcagagttgcattgcaagatcaacaacaaatatggaagtagaatttattgctttagataaagccggtgaggaagccgaatggcttcgtaattttgttgaggatgttcccagttggccaaaaccaatactagttgtaggcatacattgtgatagccaagccgccattggaagggctaggaacatcatgtataatgacaagtctagacatatatgtcgtaggcatgataccgtaaaaacaactactctcgaatggaatcatttcaatagactatgtgaggtctaaagagaacatagtggatccattaactaaagggattactagagagttagttgaaaatttgttgaaaggaatgggtttaaggcctatcaattgttgatcatcgcggtaactctaccttgatgagtggagatcccacgaactaggttcaaagagaccactaagtcatgatcgactgttaaacgctgtggagttttaaactcatactcattcctatgactagacagtgtatatgggggtaagcataacgacttttaatggtttcttaatctgatgtgtccagatgatgtatgtggaggtatatcacaagaaatcacctatgtgagtgtcaagtggggccgcttcaatgagaacttaaagaggctgattctctacaacactcgcagaaccaagtaggtgtccacgaccaaaatggacacaacaatgaggactagcaatgtcagggaagcaattgtgtgtctcctattgtcttggtatgcacaataaaggtcgggttcaaggcatcacgaccacctagtatactcgataggtttacactagagaagattcaaaggtaacccctacctatctcgatgcaattgtttctcgctaaggaatcacacttgcatacatattcatatgcatttagtcatgttgagttgaatctcttattcatgtgagggattgttggagtttatgtttaaaaacttcatggattatgaataagaggtggttggaaaaatgttagaaaaatagtaactactcccaatcgctccaataacgaatagtctcgatgattcgaaaaataataactactcccaaccgctttgatatcgaatggttgtgatagttcactgccaacagtcgcgatggttcgccggcaactcttcaacatggttgtgtgttatctatatatagacacagagacaatcagaaaaatagatagaaaaaaatagtagttttttctgatcttctcgcttacatgctactgcattttcatatcacataaattcttcattctttgtgtgtggttcctcaagcattcgttatgttcgtttgggctgttgattggtagtaccactgatcttcagacgttgatccgttctatcatggtaggcaattgttcatcaacttttgacatcaattggagggaacaaattgtcttaaagagacaaccttattgggttcggatcctttcatctctatacatttgtatttgtttcatactcatcatacaagttctatttaaattgttttgtgcagttataatagattatattgtccctcttgactactcaaattttgacttgtgtaattggatgtattcgaattctaaaatattaattattaacaacattatttgcctacgagataaaaaatgtcaaagcatttaagaaaaagaaacgtcctaaacttaactctggtcgttgtcggtgggtattttagtagataaaattctagtgacattaatgactctttatttttaatgtaaaagaattctatttcattaaaggtttttcaaaaattatggaaatatttttttctcggaatatttagacttatcacttgagagttctttccaaatatcattatctaaaattgttaactttaactaagttcctatccattttattttcttgatctttaaggtagaaataataataataataataataataataataataataataataataataataataataatttaaagtgcaagtaattaacaaattcgctcgtgcatgtaactaaatttggttttaatttctttctcttttcgttaatgttaaatcccccatctttagtgtgtgttttttgttacttttcataattacccatgagtctaggggcggggcaaactttagcaaactttctgggggccctgtttaatattttccttttttagaaaagggggccctcaattggcaatttaaaaataaataaaatgtaaaagtagtaaaaattgttgttggtaggaattgaaccttggacctcttggttattaaaaatagacattaccatctcctctaatttttaatattaaacatatgttgcagtacttaatatttgaggccccttatttttttgggccctgtgcggttgggcaccttgcatgggcccagaaccgcccctgcatgagtcatgtatgatatctaatctccaaacaataaaaaaaattgtttctaaacatgatttagtacagttagaaaatggcagagtcagaagaatgaatgatatctaatctccatccaattgtgtagattgagtcatgtctaatatgtaattacgaatcatattgtttgtaaattagatgaagatcaaatcatattgaattcaatgtacattgaattcaaacgcaatcaaatctataataactacataaattacatattattaataatgagtgaggtgttaaaaaagaattatgctatatgctcctcctaatttcttctacaaatccttctactacctctacctttaatggtaaatattgaataaaaaagcaaacctatctaatatctttggaattataaaacacattcattacttaccataaaagggagggtagttggaggatttctaggaggatgatctaggacgaattagaattattcattaaaaaaaacatatggttatcattaaaataattttacatttgaattcatttttggtataagtgatatggtgtaacctatgtttaatggtttttattgtggatgagatatagaaaatgaaaatgcatcgagccaaatactcatatttctgttttaggagattcgtttaaattatttgttttggtcataatttaattgtcatcatacttaggtaagattcctttaaacctataaggattgaaataaatatgaaagaggtttatttagacgaatgagacgcatgtagatatcacatataaggattgaatattttcttttgtcccgttaagaatgtaattatggaatgctttggcaaaacaaaggaaaaaaaactagtgtgatttcaaagacaatctctaccatttaagcttctctctctctctctctctctctctctctatatatatatatatatatatatatatatatatacacannnnnnnnnnnnnnnnnnnnnnnnnnnnnnnnnnnnnnnnnnnnnnnnnnnnnnnnnnnnnnnnnnnnnnnnnnnnnnnnnnnnnnnnnnnnnnnnnnnnnnnnnnnnnnnnnnnnnnnnnnnnnnnnnnnnnnnnnnnnnnnnnnnnnnnnnnnnnnnnnnnnnnnnnnnnnnnnnnnnnnnnnnnnnnnnnnnnnnnnnnnnnnnnnnnnnnnnnnnnnnnnnnnnnnnnnnnnnnnnnnnnnnnnnnnnnnnnnnnnnnnnnnnnnnnnnnnnnnnnnnnnnnnnnncgaatgagacgcatgtagatatcacatataaggattgaatattttcttttgtcccgttaagaacgtaattatggaatgcttaggcaaaacaaaggaaaaaaactagtgtgatttcaaagacaatctctaccatttaagcttctctctctctctctctatatacatatatatatatatatatatatatatatatatacacacacacagttttcatagaatgattaaagctaatctttctagaaaattgtttgacttttaaggtacatagaaagatagggagctttgtatcctttttatatctcctaaccatccataatgaaaaatgatgaaaaaaactaggaaacttgaaatattctacccaaatttgactcaagtcataatttttttgcataaaccattagctagattttgaaaacttgcttaagctcaaaattctcaacttgaaccctattttgtccaaaattcaattaagcaaaaaaaacttgacttcaaccgacttcgtccataatgctaaaacttacgtacatttccaaattcgcgtaaacctttttttctttttttttttgcttaagccaatttgcattctacaacatgattccttcaaaattttgagctttcaatgtcagttatggctacccaaacatataaactcacaataaatgcatcaacaattgccccttgagcttttaaacactaaatcccaacaaaagaacttaaaatttaaatcaaataactcaaaaccaccataaaacaaggaaaaaagggtaagcttcccttagcaacaaacatctccaaactgggttttgagaagaaaaaataggaaatatattgagctcaaccaaggaattttctccaatcttcaacaccacggtaccacatcatacttatggaaacacaataaaaatcacatccatgagggtctttacatcaaaaccaatcatgattcaaccacatccatgaggtcccctttgagtgaacttcaaagatcttagctctagagaggagagaaaacttgaaggaggagaagaagggagaaaataagagggaggaagctaggagcttacgcttttggaagggtgtgtctttaaaagattttagactttttccctatgataccaccccaaaaaattgtaagaggactagaacacaagactttatgggttttttttcccaatatacacctatttccatccaatatttcccaatatacatcctttttgcaaaattttcccaaaatacacctctttttagtgtaagtgggaagtctgggtttgtatacccaacttctcaccatgcagttatcaattttttttgttatatcactgtgcagttatcaatttttttataaaaaaaaattagttatgcttggaagtcgggatttcatcacccgacttccgtacgtgatttttttatatatttttaaatgtttttaattttttaaattatgatttttttaaaataaataaatagatatgattgttttttattttattttttatttttttaataaaaaaattagttatgcttggaagtctggatttcatcacccgacttccgtacatggttttttttatattttttaaattatgattttttaatttttttaaatttttttggtgtaataattttaaaaaagagtaaagtgatgaaaaataaatagattaaaaataaagtggatatacaatgttaaaacaaataaaaaaataaaagtgattaattaataaattgattaaaaagaaagtggatatataattatgatatctaagttaagacattaaaacaacaaaaaataacaataattagatagataaatataataatggaaacataatagaataacaacaagtacaaacattagtaattaaaaagagaaacacaaccaacagatattaaaaaacgaaaataacaaaacgtactaacaataacaattgaaacatgaaaatgagaaaactaatcataatttgacagatgttgtgcagcagaccaacacacgggtgtttttcatagcacattaacattgtgcaaacatcatcatcattttttagttgtagagaatgaaaaaataattgctaacctgcatcaattgatggttgtcaatagtagatttcatgcacagattggtcattggttagatgaagggtgttgtgcattctactctttagcgtttggaaagaacactcagtaaaaactcgcattggtattggagtaggacattgaaaataaacaccagttttgttttgtatgattgatccatttggaaaaatgaatgctaatattgagttagcaatggtttgagtggttgtttctcccaagaatgtcataatatgaagattgaattttgtttgtgagggtatattgtgtcgaagtgtgtagctgtatagttttgtttatttatagacaactgaataattgtaacgttgatgttatcgaattttgataaggttagaattgtgtatttgggtagagatttgtcaggtatccaatattgattgagacatttcattattccaacttttacttttatcgatatagtacatagtgttgtcattttagactgtgattttagctttgtacgtagtgtacaaattcattattgatgttttacattgaattttaattggcagttgtccattatttggaataggtttgtcaggtatccaatgttgattgagacatgtcactttgccaacttttttttttttaaaatgtctaacatgaccacttaaacattgtttgaagggtcgaaacatgtttttgttgttttttggccattttttgagagcgttgttgattaaactgttggacgatatattttttttgggttgtttgacgtgaaaactatgaaaaacaattgaaaggaatttttgtaatatcttggagaaaatttttaaaaaatgtctaacttgaccacttgaacattgttttaagggtcgaaaacatgttttttttttttccaaaaggttgatgaacaggtgatggtgtagaaaacattgattgaggtggtggatctggaaattgtgcttcttcaaaggttgtccctgcaacattatgggtatttgttgtgcgtggatcatttagttgttgtacaatcgacaagaacaaaatagtgttttgcctataccattccatatactccggtgtatgtgttaatggcccttgaaccgattgtccaattaaaacatcagtgcgtttgtttttccagaaattaatccaccccgcatgatattccatccagtcaatgtaatgattacctcacatgtcaatctggtgaagttgatctagattcatgggatcaatagggatatcttgatgcaaaccaaattgtagcttgacccggtttgtttgatgccattcgacgactaaaaaacaaataattgcagtgcatgcagaccaaatgtccatgtctctgtatgcatgtcttggtaggtgctcttcaaatcctctatatgggacccaacaaaactggaatatatgtaaacaaggcaacattactaaattttaagatgcatattgatggtgctattgatgatagtaacatacctaatggctttccatatgatctatacgagatctatatccgtccaagtcaccatgaggtgtgccagtatgttgtaattcaccaccactctatctgaagtttcaaaaagaaatttagtcattattcattaaaatgttataatgggcttcattgaaatgaaaatatttgatatcattatttgcaataactttttagagagtggataagttgttttgggccgtaggctcttggtgcaataaaaggcatgtggtaccaagcccatgactgcaatagtatggcacaaccacccataactctaccaacctccgatgatgcccgacacagctctctgtacatgtttgctaaacaagcaaaaccccaactatatctctttatgttgttgaaatcacgtaataggttcaaatacattagatgaactctatttccagatttattaggaattagagcatcaccaacgatgtacattatgtaagctctacacctgcattgtagttggtgtattgttggttcttcaggtaatggtgtgcgcaaaatgctaagcaaccatgttagcttcattgcagctcccttacgtgcattatccggagggacttctcctaataactcgtcgcataaatcattccaatttaagaagctaggtcctgtcacaacacgaccatcgaccctaatgcctaaatgtagtgcaacgtcgcataaatcattccaatttaagaagctaggttctgcactgtttaattagggcaatatgttggaacccgatagactttaataatggcataatttgtggttgtggttcaggtattgtatgataatacgaactgattaggacgttatttgtggtacgtgaacggtgaacgtgttgatgacgcaatagaggtatatgagccatgacaacaaggtttaattgtaaaacggtaatgagtgaaataaaatttgaagttggtgatgaaaatgtgtagtcgacattcacatcctatcaatttataatgtaaattgcctcgagatctgaaaccacgttttcactttggttcataataaggcctcgagattccaaagcacgttaagacaattttctcactatcatgcatcgagatctaaaaccacgtgaaccatagacctgtcattcatgctatatataaaggcataatatcagtacaacttttgcatagttgcatcaaataacattgtgcacaaaaaacaaagagagcaagcaaaatgagttcagagccaatttgtgtgtatgtttatataaatggtgaggtcatccacaattctagtggaaatgcaattttcagcagtgacaagaccaaatcgatatttctgtattcaacaatgactttgccagacataatcaacagtatacagtcatcaattacagattatggtgttacacctatagttattgcactttggtttcgttgtcctctataacaatctcatggatgtgttaagtatatggccattcaaattattgacgaagaaggtgttttgtgcatgttcgatatatttgaaaaaatgacgaccgtaatatgtttggaacttagagttgatgttcaaatctcgtcgtcaccttctcaagttaatgatcaaagttgcgcgaagatggagcaccacctcgacaattccttgaaattagaatgaacaatttcttgtattttgactttgtattgcttttatctgtttgttagtctttaaaatgtctgtcgttgtttcatgctttttaactgttaatttcaaataactataataatatgatcctgaatgctttgcacatgcgtcacactgttcactcacatgcaccggcaaaggcattaatacggataccagtaattcacgtgggctctatgatcgatgcggtccacagtctaagtcacattgttcactcacatgcaccggtaaaggcatcaatgcggatgccagtaatctgcgtgggctctgtgatcaatgcggtccatagtctatgaggctacagagagtccgttgcctgtggtctgcgcatgcgtcacactgttcactcacatgcacaagcaaaggcatcaatgcggataccagtaatccgcgtgggctctgtgatcgatgcggtgcatagtctataaggctatagacaacctgttacctgtggtctgcgcatgcgttacactgttcactcacatgcaccggcaaaggcatcaatacggattccagtaatccgggtgggcctccatgatcgatgcagtccacagtctatgaggctatagacaacctgttgcctgtggtctacgcatgcgtcatactgttcactcacatgcaccggcaaaggcatcaatacggatgccagtaatccgcgtgggctctgtgatcgatgcggtccatagtctatgaggctataaacaacctgttgcctgtggtctacgcatgcgtcacactgttcactcacatgcaccggcaaaggccttaatgcggctgctagtattccgcgtgggctctatgatcgatgtcgtccacagtccttgaggctacagactgtaaacctatacgttcccacctaatcgtcccacttaacgatcccacctaaccgttcaacctagacgttcctatctaattgtcccacttaactatcccacctaaccgtccaacctagacgttcccaactaatctgtaacaccccgtaggcctccgacgtgttatcattaataatatcagatcagcgcataaaacatcaataaaatagtttagcggaaacataggatcgttttcttgatacattatgcatggaaacgcataaatatatgttattaacacacacacatatacagaaacataaaccacgcccttgctgatccagattatcaatataacataataagacagataacagatctttaggcagagtaacaacaaataaaacatacacatgtactcagggaaggtatcatatacatatcatcgaagttctgtacagacatatacatcnnnnnnnnnnnnnnnnnnnnnnnnnnnnnnnnnnnnnnnnnnnnnnnnnnnnnnnnnnnnnnnnnnnnnnnnnnnnnnnnnnnnnnnnnnnnnnnnnnnnnnnnnnnnnnnnnnnnnnnnnnnnnnnnnnnnnnnnnnnnnnnnnnnnnnnnnnnnnnnnnnnnnnnnnnnnnnnnnnnnnnnnnnnnnnnnnnnnnnnnnnnnnnnnnnnnnnnnnnnnnnnnnnnnnnnnnnnnnnnnnnnnnnnnnnnnnnnnnnnnnnnnnnnnnnnnnnnnnnnnnnnnnnnnnnnnnnnnnnnnnnnnnnnnnnnnnnnnnnnnnnnnnnnnnnnnnnnnnnnnnnnnnnnnnnnnnnnnnnnnnnnnnnnnnnnnnnnnnnnnnnnnnnnnnnnnnnnnnnnnnnnnnnnnnnnnnnnnnnnnnnnnnnnnnnnnnnnnnnnnnnnnnnnnnnnnnnnnnnnnnnnnnnnnnnnnnnnnnnnnnnnnnnnnnnnnnnnnnnnnnnnnnnnnnnnnnnnnnnnnnnnnnnnnnnnnnnnnnnnnnnnnnnnnnnnnnnnnnnnnnnnnnnnnnnnnnnnnnnnnnnnnnnnnnnnnnnnnnnnnnnnnnnnnnnnnnnnnnnnnnnnnnnnnnnnnnnnnnnnnnnnnnnnnnnnnnnnnnnnnnnnnnnnnnnnnnnnnnnnnnnnnnnnnnnnnnnnnnnnnnnnnnnnnnnnnnnnnnnnnnnnnnnnnnnnnnnnnnnnnnnnnnnnnnnnnnnnnnnnnnnnnnnnnnnnnnnnnnnnnnnnnnnnnnnnnnnnnnnnnnnnnnnnnnnnnnnnnnnnnnnnnnnnnnnnnnnnnnnnnnnnnnnnnnnnnnnnnnnnnnnnnnnnnnnnnnnnnnnnnnnnnnnnnnnnnnnnnnnnnnnnnnnnnnnnnnnnnnnnnnnnnnnnnnnnnnnnnnnnnnnnnnnnnnnnnnnnnnnnnnnnnnnnnnnnnnnnnnnnnnnnnnnnnnnnnnnnnnnnnnnnnnnnnnnnnnnnnnnnnnnnnnnnnnnnnnnnnnnnnnnnnnnnnnnnnnnnnnnnnnnnnnnnnnnnnnnnnnnnnnnnnnnnnnnnnnnnnnnnnnnnnnnnnnnnnnnnnnnnnnnnnnnnnnnnnnnnnnnnnnnnnnnnnnnnnnnnnnnnnnnnnnnnnnnnnnnnnnnnnnnnnnnnnnnnnnnnnnnnnnnnnnnnnnnnnnnnnnnnnnnnnnnnnnnnnnnnnnnnnnnnnnnnnnnnnnnnnnnnnnnnnnnnnnnnnnnnnnnnnnnnnnnnnnnnnnnnnnnnnnnnnnnnnnnnnnnnnnnnnnnnnnnnnnnnnnnnnnnnnnnnnnnnnnnnnnnnnnnnnnnnnnnnnnnnnnnnnnnnnnnnnnnnnnnnnnnnnnnnnnnnnnnnnnnnnnnnnnnnnnnnnnnnnnnnnnnnnnnnnnnnnnnnnnnnnnnnnnnnnnnnnnnnnnnnnnnnnnnnnnnnnnnnnnnnnnnnnnnnnnnnnnnnnnnnnnnnnnnnnnnnnnnnnnnnnnnnnnnnnnnnnnnnnnnnnnnnnnnnnnnnnnnnnnnnnnnnnnnnnnnnnnnnnnnnnnnnnnnnnnnnnnnnnnnnnnnnnnnnnnnnnnnnnnnnnnnnnnnnnnnnnnnnnnnnnnnnnnnnnnnnnnnnnnnnnnnnnnnnnnnnnnnnnnnnnnnnnnnnnnnnnnnnnnnnnnnnnnnnnnnnnnnnnnnnnnnnnnnnnnnnnnnnnnnnnnnnnnnnnnnnnnnnnnnnnnnnnnnnnnnnnnnnnnnnnnnnnnnnnnnnnnnnnnnnnnnnnnnnnnnnnnnnnnnnnnnnnnnnnnnnnnnnnnnnnnnnnnnnnnnnnnnnnnnnnnnnnnnnnnnnnnnnnnnnnnnnnnnnnnnnnnnnnnnnnnnnnnnnnnnnnnnnnnnnnnnnnnnnnnnnnnnnnnnnnnnnnnnnnnnnnnnnnnnnnnnnnnnnnnnnnnnnnnnnnnnnnnnnnnnnnnnnnnnnnnnnnnnnnnnnnnnnnnnnnnnnnnnnnnnnnnnnnnnnnnnnnnnnnnnnnnnnnnnnnnnnnnnnnnnnnnnnnnnnnnnnnnnnnnnnnnnnnnnnnnnnnnnnnnnnnnnnnnnnnnnnnnnnnnnnnnnnnnnnnnnnnnnnnnnnnnnnnnnnnnnnnnnnnnnnnnnnnnnnnnnnnnnnnnnnnnnnnnnnnnnnnnnnnnnnnnnnnnnnnnnnnnnnnnnnnnnnnnnnnnnnnnnnnnnnnnnnnnnnnnnnnnnnnnnnnnnnnnnnnnnnnnnnnnnnnnnnnnnnnnnnnnnnnnnnnnnnnnnnnnnnnnnnnnnnnnnnnnnnnnnnnnnnnnnnnnnnnnnnnnnnnnnnnnnnnnnnnnnnnnnnnnnnnnnnnnnnnnnnnnnnnnnnnnnnnnnnnnnnnnnnnnnnnnnnnnnnnnnnnnnnnnnnnnnnnnnnnnnnnnnnnnnnnnnnnnnnnnnnnnnnnnnnnnnnnnnnnnnnnnnnnnnnnnnnnnnnnnnnnnnnnnnnnnnnnnnnnnnnnnnnnnnnnnnnnnnnnnnnnnnnnnnnnnnnnnnnnnnnnnnnnnnnnnnnnnnnnnnnnnnnnnnnnnnnnnnnnnnnnnnnnnnnnnnnnnnnnnnnnnnnnnnnnnnnnnnnnnnnnnnnnnnnnnnnnnnnnnnnnnnnnnnnnnnnnnnnnnnnnnnnnnnnnnnnnnnnnnnnnnnnnnnnnnnnnnnnnnnnnnnnnnnnnnnnnnnnnnnnnnnnnnnnnnnnnnnnnnnnnnnnnnnnnnnnnnnnnnnnnnnnnnnnnnnnnnnnnnnnnnnnnnnnnnnnnnnnnnnnnnnnnnnnnnnnnnnnnnnnnnnnnnnnnnnnnnnnnnnnnnnnnnnnnnnnnnnnnnnnnnnnnnnnnnnnnnnnnnnnnnnnnnnnnnnnnnnnnnnnnnnnnnnnnnnnnnnnnnnnnnnnnnnnnnnnnnnnnnnnnnnnnnnnnnnnnnnnnnnnnnnnnnnnnnnnnnnnnnnnnnnnnnnnnnnnnnnnnnnnnnnnnnnnnnnnnnnnnnnnnnnnnnnnnnnnnnnnnnnnnnnnnnnnnnnnnnnnnnnnnnnnnnnnnnnnnnnnnnnnnnnnnnnnnnnnnnnnnnnnnnnnnnnnnnnnnnnnnnnnnnnnnnnnnnnnnnnnnnnnnnnnnnnnnnnnnnnnnnnnnnnnnnnnnnnnnnnnnnnnnnnnnnnnnnnnnnnnnnnnnnnnnnnnnnnnnnnnnnnnnnnnnnnnnnnnnnnnnnnnnnnnnnnnnnnnnnnnnnnnnnnnnnnnnnnnnnnnnnnnnnnnnnnnnnnnnnnnnnnnnnnnnnnnnnnnnnnnnnnnnnnnnnnnnnnnnnnnnnnnnnnnnnnnnnnnnnnnnnnnnnnnnnnnnnnnnnnnnnnnnnnnnnnnnnnnnnnnnnnnnnnnnnnnnnnnnnnnnnnnnnnnnnnnnnnnnnnnnnnnnnnnnnnnnnnnnnnnnnnnnnnnnnnnnnnnnnnnnnnnnnnnnnnnnnnnnnnnnnnnnnnnnnnnnnnnnnnnnnnnnnnnnnnnnnnnnnnnnnnnnnnnnnnnnnnnnnnnnnnnnnnnnnnnnnnnnnnnnnnnnnnnnnnnnnnnnnnnnnnnnnnnnnnnnnnnnnnnnnnnnnnnnnnnnnnnnnnnnnnnnnnnnnnnnnnnnnnnnnnnnnnnnnnnnnnnnnnnnnnnnnnnnnnnnnnnnnnnnnnnnnnnnnnnnnnnnnnnnnnnnnnnnnnnnnnnnnnnnnnnnnnnnnnnnnnnnnnnnnnnnnnnnnnnnnnnnnnnnnnnnnnnnnnnnnnnnnnnnnnnnnnnnnnnnnnnnnnnnnnnnnnnnnnnnnnnnnnnnnnnnnnnnnnnnnnnnnnnnnnnnnnnnnnnnnnnnnnnnnnnnnnnnnnnnnnnnnnnnnnnnnnnnnnnnnnnnnnnnnnnnnnnnnnnnnnnnnnnnnnnnnnnnnnnnnnnnnnnnnnnnnnnnnnnnnnnnnnnnnnnnnnnnnnnnnnnnnnnnnnnnnnnnnnnnnnnnnnnnnnnnnnnnnnnnnnnnnnnnnnnnnnnnnnnnnnnnnnnnnnnnnnnnnnnnnnnnnnnnnnnnnnnnnnnnnnnnnnnnnnnnnnnnnnnnnnnnnnnnnnnnnnnnnnnnnnnnnnnnnnnnnnnnnnnnnnnnnnnnnnnnnnnnnnnnnnnnnnnnnnnnnnnnnnnnnnnnnnnnnnnnnnnnnnnnnnnnnnnnnnnnnnnnnnnnnnnnnnnnnnnnnnnnnnnnnnnnnnnnnnnnnnnnnnnnnnnnnnnnnnnnnnnnnnnnnnnnnnnnnnnnnnnnnnnnnnnnnnnnnnnnnnnnnnnnnnnnnnnnnnnnnnnnnnnnnnnnnnnnnnnnnnnnnnnnnnnnnnnnnnnnnnnnnnnnnnnnnnnnnnnnnnnnnnnnnnnnnnnnnnnnnnnnnnnnnnnnnnnnnnnnnnnnnnnnnnnnnnnnnnnnnnnnnnnnnnnnnnnnnnnnnnnnnnnnnnnnnnnnnnnnnnnnnnnnnnnnnnnnnnnnnnnnnnnnnnnnnnnnnnnnnnnnnnnnnnnnnnnnnnnnnnnnnnnnnnnnnnnnnnnnnnnnnnnnnnnnnnnnnnnnnnnnnnnnnnnnnnnnnnnnnnnnnnnnnnnnnnnnnnnnnnnnnnnnnnnnnnnnnnnnnnnnnnnnnnnnnnnnnnnnnnnnnnnnnnnnnnnnnnnnnnnnnnnnnnnnnnnnnnnnnnnnnnnnnnnnnnnnnnnnnnnnnnnnnnnnnnnnnnnnnnnnnnnnnnnnnnnnnnnnnnnnnnnnnnnnnnnnnnnnnnnnnnnnnnnnnnnnnnnnnnnnnnnnnnnnnnnnnnnnnnnnnnnnnnnnnnnnnnnnnnnnnnnnnnnnnnnnnnnnnnnnnnnnnnnnnnnnnnnnnnnnnnnnnnnnnnnnnnnnnnnnnnnnnnnnnnnnnnnnnnnnnnnnnnnnnnnnnnnnnnnnnnnnnnnnnnnnnnnnnnnnnnnnnnnnnnnnnnnnnnnnnnnnnnnnnnnnnnnnnnnnnnnnnnnnnnnnnnnnnnnnnnnnnnnnnnnnnnnnnnnnnnnnnnnnnnnnnnnnnnnnnnnnnnnnnnnnnnnnnnnnnnnnnnnnnnnnnnnnnnnnnnnnnnnnnnnnnnnnnnnnnnnnnnnnnnnnnnnnnnnnnnnnnnnnnnnnnnnnnnnnnnnnnnnnnnnnnnnnnnnnnnnnnnnnnnnnnnnnnnnnnnnnnnnnnnnnnnnnnnnnnnnnnnnnnnnnnnnnnnnnnnnnnnnnnnnnnnnnnnnnnnnnnnnnnnnnnnnnnnnnnnnnnnnnnnnnnnnnnnnnnnnnnnnnnnnnnnnnnnnnnnnnnnnnnnnnnnnnnnnnnnnnnnnnnnnnnnnnnnnnnnnnnnnnnnnnnnnnnnnnnnnnnnnnnnnnnnnnnnnnnnnnnnnnnnnnnnnnnnnnnnnnnnnnnnnnnnnnnnnnnnnnnnnnnnnnnnnnnnnnnnnnnnnnnnnnnnnnnnnnnnnnnnnnnnnnnnnnnnnnnnnnnnnnnnnnnnnnnnnnnnnnnnnnnnnnnnnnnnnnnnnnnnnnnnnnnnnnnnnnnnnnnnnnnnnnnnnnnnnnnnnnnnnnnnnnnnnnnnnnnnnnnnnnnnnnnnnnnnnnnnnnnnnnnnnnnnnnnnnnnnnnnnnnnnnnnnnnnnnnnnnnnnnnnnnnnnnnnnnnnnnnnnnnnnnnnnnnnnnnnnnnnnnnnnnnnnnnnnnnnnnnnnnnnnnnnnnnnnnnnnnnnnnnnnnnnnnnnnnnnnnnnnnnnnnnnnnnnnnnnnnnnnnnnnnnnnnnnnnnnnnnnnnnnnnnnnnnnnnnnnnnnnnnnnnnnnnnnnnnnnnnnnnnnnnnnnnnnnnnnnnnnnnnnnnnnnnnnnnnnnnnnnnnnnnnnnnnnnnnnnnnnnnnnnnnnnnnnnnnnnnnnnnnnnnnnnnnnnnnnnnnnnnnnnnnnnnnnnnnnnnnnnnnnnnnnnnnnnnnnnnnnnnnnnnnnnnnnnnnnnnnnnnnnnnnnnnnnnnnnnnnnnnnnnnnnnnnnnnnnnnnnnnnnnnnnnnnnnnnnnnnnnnnnnnnnnnnnnnnnnnnnnnnnnnnnnnnnnnnnnnnnnnnnnnnnnnnnnnnnnnnnnnnnnnnnnnnnnnnnnnnnnnnnnnnnnnnnnnnnnnnnnnnnnnnnnnnnnnnnnnnnnnnnnnnnnnnnnnnnnnnnnnnnnnnnnnnnnnnnnnnnnnnnnnnnnnnnnnnnnnnnnnnnnnnnnnnnnnnnnnnnnnnnnnnnnnnnnnnnnnnnnnnnnnnnnnnnnnnnnnnnnnnnnnnnnnnnnnnnnnnnnnnnnnnnnnnnnnnnnnnnnnnnnnnnnnnnnnnnnnnnnnnnnnnnnnnnnnnnnnnnnnnnnnnnnnnnnnnnnnnnnnnnnnnnnnnnnnnnnnnnnnnnnnnnnnnnnnnnnnnnnnnnnnnnnnnnnnnnnnnnnnnnnnnnnnnnnnnnnnnnnnnnnnnnnnnnnnnnnnnnnnnnnnnnnnnnnnnnnnnnnnnnnnnnnnnnnnnnnnnnnnnnnnnnnnnnnnnnnnnnnnnnnnnnnnnnnnnnnnnnnnnnnnnnnnnnnnnnnnnnnnnnnnnnnnnnnnnnnnnnnnnnnnnnnnnnnnnnnnnnnnnnnnnnnnnnnnnnnnnnnnnnnnnnnnnnnnnnnnnnnnnnnnnnnnnnnnnnnnnnnnnnnnnnnnnnnnnnnnnnnnnnnnnnnnnnnnnnnnnnnnnnnnnnnnnnnnnnnnnnnnnnnnnnnnnnnnnnnnnnnnnnnnnnnnnnnnnnnnnnnnnnnnnnnnnnnnnnnnnnnnnnnnnnnnnnnnnnnnnnnnnnnnnnnnnnnnnnnnnnnnnnnnnnnnnnnnnnnnnnnnnnnnnnnnnnnnnnnnnnnnnnnnnnnnnnnnnnnnnnnnnnnnnnnnnnnnnnnnnnnnnnnnnnnnnnnnnnnnnnnnnnnnnnnnnnnnnnnnnnnnnnnnnnnnnnnnnnnnnnnnnnnnnnnnnnnnnnnnnnnnnnnnnnnnnnnnnnnnnnnnnnnnnnnnnnnnnnnnnnnnnnnnnnnnnnnnnnnnnnnnnnnnnnnnnnnnnnnnnnnnnnnnnnnnnnnnnnnnnnnnnnnnnnnnnnnnnnnnnnnnnnnnnnnnnnnnnnnnnnnnnnnnnnnnnnnnnnnnnnnnnnnnnnnnnnnnnnnnnnnnnnnnnnnnnnnnnnnnnnnnnnnnnnnnnnnnnnnnnnnnnnnnnnnnnnnnnnnnnnnnnnnnnnnnnnnnnnnnnnnnnnnnnnnnnnnnnnnnnnnnnnnnnnnnnnnnnnnnnnnnnnnnnnnnnnnnnnnnnnnnnnnnnnnnnnnnnnnnnnnnnnnnnnnnnnnnnnnnnnnnnnnnnnnnnnnnnnnnnnnnnnnnnnnnnnnnnnnnnnnnnnnnnnnnnnnnnnnnnnnnnnnnnnnnnnnnnnnnnnnnnnnnnnnnnnnnnnnnnnnnnnnnnnnnnnnnnnnnnnnnnnnnnnnnnnnnnnnnnnnnnnnnnnnnnnnnnnnnnnnnnnnnnnnnnnnnnnnnnnnnnnnnnnnnnnnnnnnnnnnnnnntttaggctagtatataaggtcctaggaagcttggagtgagctctaatggaggttgatggctggaggaagaagaaaactcactttccccctccattttcgcgtttgacccttatatactcagcctgcccgaggtctggcgcgatccgcgccacctctggcgctacccgcgccacaatgtcggtgctccggcgccaaccgcgtgacgttggcgcgatccgcgccagttccctggcgcccctagcgtggcctctggcgctgaccgcgtgagattccagaggaaaatggttttccagaccacttccaacgcgatccgcgcggccatggcgcttcccgcgccaaccattctgccagtccacgccctaggcgccatatccacgctaccagcgtggagttgcagagtctgtggcgcgatcagcgccaatcctggcgccatcagcgccacaccctcaacggggttttctaatgtgaatccccgcgctatcgcgcggggtctggcgccaagaatgagggtccttacataatcctcccactatcacacctaaccctccaacctaaacgttcctacctaaccctcccacctaacttttcgaccctatatataatcccaccaattcagaatacatcacatacaacaacatactcacaatacaaacctctattcctaactctcatactcttcccagtcacatccccaaaacaccactcatggctccacgtaaagaaatatcatttatcattcatcatcatggtcatatatttgacgaccctgttgaaggatcagtgtacgcatgtgcaaacccaatatttctatacgtaagtaggtctattatgttaacacgacttatttgaaaaattacccaacgtctccctactcaagcaactgaaacagttgttcagttgttatatcgtgtccctgtttcattgtatcataccgaaacacgttatatttcagcacaattacacgacaatgatgatcttagaggcaccgtggaaacacctgtccataatccacaattgggttctgcccaactgtatgctgttactgagcgtatttctcaaccacaaccacaaccaccttcatacacagaccttgaaacacaagacgcctttgacgtttacacttcatacacacaactactatcccaaaatgattctttttctgatgcccaacaaacctcctttcaccaacaatactatcatccatcacccccatcacaacaaccacaaacacaaacatcaaacccaattgaagatcccatcactaataaagatcccatcatacgatttcacgaagaaaacatggatgattttagtgagcatgaggatcaagagttgtttgatcacaacaatgatcaaagcgatgatgagggttttgtcgtaccaacgtcacctcctttacaatatcatcaacaaaggtgtccagcggggttgaacctcgaccacctacgacaatacactgatcaccaccatttcattcaacaacaagaccatgtgcaaccaccaactggtgcactcaaggctggcatgaccttcgatgaaaaagcacaatgtattcgagcagtcaaagaatacaacatcaaaaatcattttgactgcaaaataatatattctgaccagagaaggctaaacctcgtgtgtaaatcacatgagaatggctgcacgtggagcttaggcgcatccaattcaaagaagcgtaacaaatggattatcaaaagtatcagaggtcaacacacttgtgtcgcaccaatgctcacacaagatcataggctacttgacaaacacgtgatagcgcaaatcatccaacccattgtcaaaacgaacccaacagtctccatcaaaatgttgattgcagagatcaaagcgtttatgaattatactctgtcctacaaaaagacatggttagcaaagcaaagagcattggagatgattcatggaaattgggaacaatcatatgccaatttgccaaaacttttgggagctctgcaatcttgtattcttgggattattgtcgttgctcaaacagaatccgtgtttgaagacaaagaaatgatacctggaaaaaaatgtttaaacgtgtcttttggtctttcagtccttgcattaatgggtttgcacattgcaaactcatcgtacaaatagatggtacatggttttacgggaagtatacaggcacattattgatagctacagtacaagacggtgttaaccatatcttcccgattgcctacgccattgtagaaaggaagacaactttagcttggagattcttccaaaagaatttgagaaggcatgttactctacaaagtaacatttctctcattttagataggcacgctgtgattataagtgcctacaacaacgcaactaacttataggttggggacacatctcatttcttctgtctgcgccacattgcacaaaatttccttcgcggtaaccccaactgcaaacatatgaagaaatcactaatgcgagctggtgagaatatttaatatttttccacttaaatatatttttttaaaaatttcatcacatattaaatttattgaatatttacagggtacgcatacacgaagaaaatgcactggcggcatcttggggatatccgtgtgaacaaaacaagtgcagctgaatggcttgatcgactacaaaaaaaaagattgggtacaatgcttcgatgagggaaaacgttgggggcaattgaccacaaatttgtctgagtcggttaattccatgttcaaaagcacaagatatttgccagtgtcatctttggttgaggagatgtatttcaagatgcaaagctttttacaattagaggccgacaaacccaagcaatgatcaactccggctcacagtattttgaagtcacctttgaggcaatgaatagaaatcaactggaatcaaatacgcacattattagtgaattcgacagacacaatcacacgtttcttgtaacagagacccaagccccacttgaaacacctagaacacctggaaggtttagggtcatgttacaatcccaaaattgtgattgtggtgaatatcaaactaaacacttaccgtgttctcacgttatggctgcctataaatctgtcactgtcgatcacatgaattatgtgtcattgctatttattttgcaaaacattttgcacatctacgacaactcatttggtttattgccacacaaatcaatgtggcaagaatatgaaggagatcagtggggtcctgatccaaggaaaagaaaaagtgcaaagggttgtccggtatcaaatcgcatacccaccgaaatgggcgaagaaattgaacgggattccaggaaaaaatgtagaatttgctgacaacaaggacataagaacaagttgtcttaacataccttcatagtattgtttttgggaaaatcttatttttttatgtattttatgtatgcatgtcattttgtatgctccattttttttttggttgtttaaattttatcatataatataattgatatatgataattatatatccactttatttttattttttttataagtatgggtttttatttttaatctacttatttttttatcactttttcctttttaaaattaaataaattaaaaacagtcataatttaaaaaataaaaaaaataaaaaataaaaaacaatcatttttattttttatttaaaaaatcataatttaaaaaaattaaaaacatttaaaaatataaaaaaaatcacatatgaaagtcgggtgatgaaattccgacttccaagcataactaatttttttatatatataaaaaaattgataactgcacaataatataaaaagaaaaatttgataactatatggtgagaaatcgagtatataaacccagacttcccacttacacttaaaagaggtgtattttggaaaaattttgcaaaaaaggtgtatattagaaaatattggatggaattaataagtgtatattgggaaaaaaaaaaccgactttatggtgtttgaaggtaaacaaaccactacaccaacatttatgtttactttatgtatgataaaaataaattttataatatatcgttatttttaaaattttatatttattaatttatgaatgggatttgctaatagacatacactcgattttcagtttgagagtattaacaatcaacacacacacaaaaaatggtaaaaaaaaacctttatctttttattttaattagtttgtttaagagtattacaataatttaatattaaaaaaaaaaagaaagaaaaaaaacatgatttctctctcaactgtatctcacctatcaacgtgtttcccttacgttttctccaaccccaacccgcctccatggacatgctactggttgtagcaacagcatcagcccaacctgttgatttaaatgcaaaaataaaacaataggaaaaaatagtcacaaggattacgattggtaatgagtcatttacatatatattaaattcatttttccgctttacataaagggtggtttgcttgcgtcagcatcgtctccaccatgtaatcagagatcacacagccatcgttctccaccgcattcatgttgctgctcatggacacattgtcgtaggaccaaaatatcaacgcgtagattcaagacaaattgtggagtgtgttgttgcggacactggccaattcaggatcagaggacgcaaattattttttttttaaataatattatttattattatacatataaaaataaaatataaaataagatttttaaagtttttgaaatttatttggttttattctttcaataaaattgtccgtttttttcttcttatttttaaaatgtaatagtcttgattttcaaactactatctaaaaatataaaataaaataaaataagttttttttaaagtttttaaaacttctttggttttattctttctataaatcgtccgtttttttttcttatttttaaattgtaatagtcttgattttcaaattactatctaaaaatataaaataaagataaaataagttttttttaaagtttttgaaatttatttggttttattctttctataaaattgtccgttttttcttcttatttttaaaatgtaatagtcttgattttcaaattactatctaaatcacttttcgctagtcgataaagaaatatgtaactcattttgaagaataaaagttattcgtgacaaacttacgagacaaaaaatgaaaataaaaaaatttaaagggacaaaaatcaaattatttttttttaaaagagactaaaaacatatgtataatttaaaagaggacgaaataccaaaccaaataagataaaagcaacaaaaatatatgaaaaaaaaaactaatcaataaaacgcaaaaattgatgaaaactaaaaacttaaaagcagtgaagtcaaatcataaaaatatgggtgaaaaaaaataacgatactaagcatatctttatgtttttcgcaaagctcagggggttaagaattaagatactactcctctcatttattcgttcgtcagtttaagatattacttattaggatgattcattttttatgggtttggatttttttggggtttcttggcttatgaatcagcccattaggttccttcttttttaaaatatttatgttatataattaaaatttataataaatataaattatattgtagttaagaattatgacaaataaatatttttaatatttaaattatattttatatttatgataaataattgatattataaaagtaaaataatgttatttttaattatcgataatattaaagctcagggggttaaaaacaaaaaaactgatttcacaaagcaaggttaggatggcttttctactgatcgaaagcatggtggccagtggcggcacgtcaaaccgagacgcgatgaaccggctgatgcacaatctaaggttctgtactctgtgtttgatttatcgtcgtcggtgacatatgaagatgatgaaggaagaagattaaatcctaccaagaattgggataaatgataacaagaaatccattgatacttagtgtgataagagagaggagagagaaatcagtttttttttttaaattaagttttaaattattataatacccttaaataaataaattaaaattaaaataaaggctttttttctcaattcttttgtgttgattggtaacgcactcaactaaaaataggatgtgtgttaacaaatccctttatgaatatatttataacaaataggatgtgtgttgatcgataaaaaaaaattaaaaattagttaaaatattttatcaaatatataatttattataataaatatatttatttatagtattataattttatcacgtatcattgagacatcaagttatgaattagaaaattattttaagataggatattaaattttttttatttttttatagagatcaaattatgtgattcaattagtgagttaataattcaattataatagtctaatagcttgatcgaattgattattggttgagtttttaaaattgagttaaactcgtgtccttaagaattaaatgccttgcttttatatatataaaggttaagtaactttggcatttaacaagcatttgaaaatttgtcatacctttttcatagacataagcataaagtccaacaaatcttttagaaaaaaaactaagttcaagaatgttctttgaaaagatcgtcattatgaaatgcacaaaaccatctagtttaaaccttaacccacaaagattagagtatatatatttgtttgcttggcagttaagccataaaagtccactaatagtttcaagaaaactaaaaatccacacaaaacataatgataccaatataagtttttatcatccaaaaatttaagcgatccatagcaaaatctctcctgctgcttgcttgtaaatttcctctactgaatttgcatctatgaactgatgtgaaactcgttttccctgtaagatcaacaattaattagtcgagttaatagtaaatcatatttatatttgtagtgctcgtgtatgtactaaataattttttttggttctttcattgtctcttaagagattcaaatcgactttagaaaggacgagtatataccaaataaaaatatggaagaaccaaaaaaaattatttagtacatacacaacataaatattttcactatcttgaaagtattgttgttgtacagacttgtatgtttttttggttacacaaatttataaatttaacaaaaactagaaagcagaaatgataaggatggtaccccaatatataatcataagacaatacggttacctttcatcacaacaaatatatttgacatatagtataatatcgcgcccaagaatattccattagagggtcccacaacaaatggtgaccccgcttgttttaggaggagtttggtttgcttgatttcattatttggaaatatataactaaaattttcaaataaaaataaattcaattttcttaataaaaaaatgcaattttagtaaattccatgatatctcttatagatatataataaaattttggtgtcactcttaagtcttaactatcaaaactttgaattaaaaacagtttatttattactttgaattaaaaacagtttagtaagtagtaacttggaattaaaaataaagtcgacaaaacatgcataataagaaaaaagatatggtgggggattgagtttcaaacttacatgggcttgaatcatgcaaacatttccataaccaatgcacgaaatgttggcagttatgacctcaatcttgtacttctccaacacaaaaccaatggtggtcatgaggcctggcttatgggctgcacaaatggagaattgggcttcatctccaaaaatgttcaagaccaaatttgaagaagcccaagtcttgtcaaaagctacagggaatgaaagtgcatttgaagtagttccaattattgcattggaaatgttgttattagaagatccctgaccagtcacaaacatagatgactcacacccaaaagtggagacacattggaccctttcttgtttctgtttctctagcttttccagggtttgctcaagatttttgatgtatgccactgcttcatccacaacggttgatttatcagcctacgaaagatcgaacatcagagtatatgttagaaaagaaattattgtgccacctaagattaattttggcggttgtcgtgaggtgggtatttgggtagaaataattctagtaacggtaatcactcaatttatataataataataataataataataatatttcttaaaaaaaaacaataataaatttgtaattaaatcgaattggaattatttttttccaaacaaagttgtaattagataaatttgaaatcaatgtaactaaaaatgttacaattagcaaaatgtgtatcggttgatcttgtgtttttttttttggtaaagaggagggccaaaggctcaaacaagagaaactacaacttagattaaatcttgtttaatatgtaatcaataatcatattgtgtgtaaattagatgtggctaaatgtcaactattagacgaaaaccgaactacatacattcatccaactacactgtttttttaccgtattgaaaccttgtagtcctatnnnnnnnnnnnattaaaatgttttttttttttatttcatttggtttagctttttgtataagataatttattagtatttgttcaatttttttagttgagatacataagctcaaatgtataaatgtgagttgtaaactctttgatacgtctttcattctcatatatataaaaatgtatagagttgattaagtatacaaagatatgtagtttaggaaatttattgagagtgtgtttggatagagaattttaatatgaaaaatttaaatttttgaaattttaaaaagaattttaaataattaaaaatgttgaattttaatttttttctaaaatgtgagaaattgaaattttcttctcctatagaagtttctaccgcgcaactctatgctccatctctatagccgacgagtattccgacctctactattatctgtgcatgaggttcaaaattttgaaaatttgaaaaagtttaatttctttatccaaatataattttaaaaataaaaaaaattaattttttttaaccaaatacagaattttgaaaatgaaagaattttaattaaaatatttaaaaatcttaaaattttaaattctttagaatttaaaattgcagttatccaaacatactctcaagttatttgatgtggtgataatttgattgtactcggattcaagtaagatccttttaaacttgttaaaaatgtcaataagaaagagatttagttagacgattgacatatatatatatatatatatatatatatagcacatataacgattgaacattttcttgaacctttaatctagataagaaatcataaagctcatataatataaaagaaagaaaaattctgtgattttgcgaaagatctctgataatattttcaaattgtcaaataaggttgaagctcattcccctaaaaaattgtttaccgtttttaaggtacatggaaagatggagaggtttaacatgttcctttattttctatgttgtccatgttggaaaaggatagaaaaaaagctaagaacctgacatatataagatagataaacttcatgggaaaaagacatccttttcagaataggatcaaaattaagtcggagaaagaagacatataatataaagtcatgtcatgcgaggataacaacataagggaaatattcacaaataataaaattatttggttatccttgaacttattcaaccacgatgaatgaaaatgaactcgattattgaatattttaccttggaaggaagatgtggaagcaaagcatgaagactggcaaacatgttcctcattttcttcctcctttctctctcggtccatatatgcatttcatgatcagattcgcgacatttttcacctctcccttcaccactagtaatattgccttggtctcgatttcgtttcttattcatgagagcttcatctttttcttctacccgatcaagtgatttcatgttttctttactttcacccgaattatcagaattggagggatcccatgaatgattttcccataagaagttcatatcatgcaaactttgatcttctacggtcaaggtcatggtagagtgagggagagtgagagagacactcacagagggattagagacttagatttgaggagaggaagattgcagaaggattttatatataggtggcgaagtacagttaaagatgcaaaaagaaaattaaaaagtagaaatgatgaggatggttaacacccccaaaatataatcataagacaatgcggttacttttcatcacagcaaatatatttaacatataacataataccgcgtacaagaatattccactatagggtcccaccatatacgatggccccacttgttttaggaagagtttggtttaatttatttcagttttaggaaatatatagctaaaattttcaaataaaaattaattcaattttcttattgaaaaatctgattttaataaattctataatatctcttataatgagatatagaaaaaggttttggtgacctcttaagatggatggcaataataattttgtttcttttaggtgggaatttgtaaactataattcttttttccttcttttttttcatctacatccttctcccatttatttatatggtaattttttaaatgattaacatatgatagttagaatatcttactcaaaaatcttatctcaaaataataaattttattagatttatctttttgcttttattcttcatatcaagctttaacctcttaaaaatatgattttttttattgtgtgtaaatgaatatatgatacaaaaattaaaaagcataaaaaattatttataattatattaaatatacaaaaagacaattttattattaaaaatatagcattagttgtgaacaatgtatttccaccatggtttttaataaaaacaaaatatttattgattttgagaaatagttaacaaaaatgctttataaaaagtgtttttttactgtcttcaattcctaatggcatttgatgtgaaggtattaaatatgcacctattaaatgcttactttttaaaagtnnnnnnnnnnnnnnnnnnnnnnnnnnnnnnnnnnnnnnnnnnnnnnnnnnnnnnnnnnnnnnnnnnnnnnnnnnnnnnnnnnnnnnnnnnnnnnnnnnnnnnnnnnnnnnnnnnnnnnnnnnnnnnnnnnnnnnnnnnnnnnnnnnnnnnnnnnnnnnnnnnnnnnnnnnnnnnnnnnnnnnnnnnnnnnnnnnnnnnnnnnnnnnnnnnnnnnnnnnnnnnnnnnnnnnnnnnnnnnnnnnnnnnnnnnnnnnnnnnnnnnnnnnnnnnnnnnnnnnnnnnnnnnnnnnnnnnnnnnnnnnnnnnnnnnnnnnnnnnnnnnnnnnnnnnnnnnnnnnnnnnnnnnnnnnnnnnnnnnnnnnnnnnnnnnnnnnnnnnnnnnnnnnnnnnnnnnnnnnnnnnnnnnnnnnnnnnnnnnnnnnnnnnnnnnnnnnnnattcacgtactaagctagacctattaaaaattatattattttaatttaacccttcatgataagataatagttttttttactgctataagatttaatagttaatatttgttctattatttttacataaaaaatcactaaatacattattcattatgagatttaatggttaatattggggctttagatctcttcaaataaatacacatattgtttttttttttttactaaataaacagatattgataaaacttgcattttgacagttannnnnnnnnnnnncctaatgatgggtgaatttttgttcttatatagtatatagtaaatacgcattaggcaatgagtgcactcttaactgtcttcttaatgaaaggaaaggatgctaacgttatgagtatacgtaatgatgattttagatgcattttgttatcattctccaagtaacttatacattcagcttaacttaattatttaacagctaactggcagtattttttttattttttttacagagctaactagcagtatttttgatcatatcataggaattcaaaattaaacgtcctgtatggttcgtaaaatgaataaaagaaaattgaaatatcattaattcattttagttaataagttttttcaatttaaggtagtcactattttaatctactcaagtcataaaattgcttttcttatttatgaaattctcctaataatagataataaattattgccttcaaacaaataaattaaaactattatgtagtgatgtggttaagaccaacgcatgatgaatcattacttaaaaaggtaaaataaaatgctacttactatgtataattgtataaacctttatattttcacaacctgaatgcaggctcgtgaacatgttatctaattttagatgataaatatcacgtactctaggagtgatgtaaatatagaaagctctattaaaatccaatgatagtaattaatggtatttgtctatttgagctagttaatttagtgatggttcaacaatatgacaatcttttcactttaagtttttatgaaaatagaaacgttaacactttacattaaagtattccactcgacaccttggcactctatagaaagtagtaactaaagtattccctgttcaaaatacagcatgcaaagtgattattgcatgcaactctggtgttttgctctcacttcagtccacagattcgaaacttatcactccaaattaaaccaagaaaaccgcaacacgcaaagtggccattatgaaacggccttgtctctcttgtgtagttgtgtttgcattgtttgcttccgtttgatgaaagaaaaacaaaaaataagagtttcactaacttttgttaacatatgttaattaatcatcgttaaagaatgttgaacagatcgataattagttaaagacatcattgatcagtttagaaagtgaacattggattcagtttagaaagtgaacattggattactcactaattatgatatggttttaaattgttttctacacgtatttctatatgtgtaaaatacttatatttattatatggtatcgtagaggcatattcgttttcacttttgagggaatcgtggttgtgtcatgattcttatatatatggcagcaccgattacacaaaccacaatacaaacgttataatatcaaataagacaaaacactatcatgtttggaatatacaaattaaactacggtttccttgatagtgtgttcttgaaaggtggtaaacccaaattctagcgttgtataagaagcttcaaagctggaaaaccaaaaatgggtgaaacattggttggctcagaaacaagatattgaagactaatgattaggtgtagtgttcaagtataattgagaaccgaactaaggtgtctccaattataccaatttaagatatatttagatatcttgtaattaaaatattttaagtagaccccacaacactaaattatatttaagtaattcatgtataaaggagaaatgagattttttttgtagttgaagggagaagagaaaaaggaaaaagaagaggggaaagattatagatttgaatctcctagagataaaaactaataaattactaattaacatttggtcaataaaaaaataatttatttataaaaaaatttaatagtgaaaatgttaaataaatcatacttagataattttttatttacacttaattttgttacaaattaaaatactaatttaatttttttaattgatacaataaaatgactttttatttttttgtttctttttaaaaaaaatcctccatatcatatataaacttgatctaccctaaaaaaaatatagacttactctagtgagaaaaatgtaattaagatataaacatccataaaaatacatgttttaaggatgctctgatcatgttttatttgctgcaaaaaattaaccccataatgtggtttggttcgaggtgataaaataatcattaaaagttgttgccaaatgtacttaactaggtccaaacatatagagattataatttttaattattattttttatataaaaaaaaaaacatctaaaattggaaatcatctttatagaaaaaaaacctgggggatcatgtgatatgcacgtttgattaattaggatcatttttcatctccatgcgacattttgtttctatgatctagtaaatgaatgccatcaattttcataaaaaaatgaataccatcatttaaaagcaatgtatattaaaataataatagtaaaatgattaacaaaatttgtattttaatattaaatgttggttaatattagtgttataaaacctggtccggtcattgacccggtcgaggtagtgaatcagtaattgattcgatttgatccagtctatattaaaaaatttaaaattgtattatatataagtatataactaatattatttgattaagaaaagtatactcaaaaattcaaaagaacaattgaagttttaaagttaataatacaagtaaagtgtattaataataaaagagagtgtaaataacaactaattaaattaaaacacaagctcaatttataattaaaaaatgagccaaaaggagtacagaaagcaatgaaagaagtacaggaagcaaatgagtatgtggatatggaagcccaagcgaaaacctaatccccaataatgtatataccttcctttgtttgttgcgctgcacttcaatttctccattttcctgtgttgcgcggttgcacctcattttcgattttctcataagcatctagcaatgccacgcctgtagaaagagttaagctactaagctaagctgctgttgtggaactcggtaaaacagactgaatgcatttgagttattggcccgtccaacatgacaatttatgagtcgctcgttcaagtgtccctcgaattgcagtgcggcggtggtcgactcgagtggcgatgaagacgtgcacaacccaatccgagttttaaagttgatcgggtcgccaggtttactcaaaatccgcccgttttaaccgggtcattccggatcacatgcttgagcagtccgatagtgcactcgatccgattatgccacaggatcccagttagattggtccaaccagccagaccgaactagattttataactatggttaatacttaatatactatataaagactacaatttcctcatacaaaatactattcctttaaaaggtggtgaattctgaagaaaaaaaaatggtgaaactattttcattaacaaaattttaatttagaattttcaaattgatcttcatctattaattctaaatgtattttaaaaaaaatcacataattttaaaaaataccttttgtccatttacaatattgttttgttaagaaattttcacaaagattactaaatataaaccctaacactttatcatgactcaagaagatcctttacaattagagcatcgatatttatacctcccaattttgttaatatacctttttttttaattttacttttctaaaaaacatcctcaattcaaaattaagttgatctatcttttgtaaatatacccgcttatcacttcgtagttcaacctcatcaatggcaaattcaactctctaatctctcctggatgccttcctcaacatcctcctcaccttcgttcagattgattcccattttaaaggctttgaactcaaagatcacaatgaccttgaaataagtctttaaaattcattgaaatcttaattcaatacaccctcctaaaactatgaattagagatgggaaaggaagatataaacaaggaggagcttaattttgaatggaattgaaaaaagttaattaaattttttaattcctcaactttttcagattctaatttttagtctctaaaaaattgtctttcattaattttctatgaacatttttagtccctcaatttttttgcctatgtttatgtttattgtctagtactggtttgaagactctttatgtttattgtctattaatctattgtcatttgtgtgatatatactagtcttttgcatggagattaattatttttttttactaatgcacggagattaacatataaaaacaaaattttcggtaaaaaaatagataaagcaaaattgatttttctattcattaatagaatattattaattacattaattgttaaatcaatcttattactttaaaaatgttgttcaattaagaataatattacagataattttttcaagttattttaatatgtgcatatgtgtgcatgtgcgtgctttttgtagccataaaaaaataatggaaaactaaaagttgtcaaatagattttgaaggactaaaattagaactaaaaaattttattggtcttttttttttcatttctttcaaagtttagcccctccttgtttatacctccctttctagttgacaaataatttcatttctttcaaattagaacttatttcgatatcattgttgtctttggctagcttcaaaacatgaaccaatgtaaacaaaggtgaggaagatggtgaggaaaacatccaagagagagtatagagttggaattgtcattgatgaggttgatgtgtggtgatgtgagatatggtgctaaggctgaaccacgatggtgaatgtttgaactaaaaatgagaaaaaaaaaaaacatttgaaaaactaaaatgttgatgaaaaattatcaaaagattaaaataacttttaaaggactaaaaattgaaatctaaagaagtcatgggactaaaatttaattaaaaaaaacaaaaatgaaagtatgtgacaaaatagggagatataaatatcaataccctacacttacattcttcaagatttatttaaaatttgggctaacaatctcaatttatacttggtgtgcaattgctgattgagaatatcaacaacactaaaaagtgttagagtgttgactaatgaaattgtgcaattgctgaataagaatatcaacactaaaaagtgtcgacagttgactaatgaaattaagcatattaacaaaacaatatgtaaaaatgaaaaagaaaaaaaaaggcttataattgagaaaagttctgaaaatattaagaatacattaatcaattttaatttttatatataaaaaaatctacgtaccccattgcctaggctccatgctatgcgtagataaggaaaagagatattacactcagtcttacccttgcatatgtaaagaaattattatggattcgaacccttgaccaacaaatcatcaagatatacttttttccaaaggctgtttccggattataaaaaatattttaaaaaaatgtaagggtatttattgaaaagtttatccaaactatgcatgaatgaatgaaacataataatgaaatttaatttaataatatctaagtgcttatagcttatcataaatgacatgtaatcatccattacaacagtataaataaaactctgcaatagttcatagttcacccaccaatgttttttgtttacttcttttcagggagcatattgtcgtccccaatcatgacaaatgagaggtcctgttctcttaagaaaaaagtttataaagaaaagctttagatagagccagcttaagaagatagaggttctccctatcatgtagataaggctgttgttttgcaaatggggcacaggttcttctgcattagccactgcttaatgcaaccactgtgaaactcatgcccacaatccagtgatccaacattctccccatcagcaaattcctcctgccatcatgaaaaaatatgaaagatgcattatgtatttagctcaaaagttaaacaccattgtatttgttttcacgtcctctttagttttacagttttactacctgagacacaaggagttataaggttaacttggtggttgagaagaggggtttaagggagaaagggggagcggggagagacaatggattcgaatctccccaaactaacattctaacaacaactaacattggctgatcataaaaggaaaaaaaaactgagaattactcgtacctgacagatacagcaaggttccaaatcagtagaagagtctgtcatgatcatggcacgcacgtaaattcgctgtttcatcaacttaatgatgacatcctcattcaatcctgtgctcacgtctcctatacgctcctccaatgccaacaattcctgcaaccccagttaaagtcagaagaaacaatagagagcaactgatggatgggaatacaatatatataccctttttacctcataagacatgttgtcgacatcaaggcgcatttctctgtgcctgtcgtgcatttcagccatgccatgatataggaaagggtcaaagagcatataatcctgacatttcaaaagtgtcaaaggaaaatgttaagttagtattttcaatagtattgcaaagtccagtggaacatggcctacaagctaacaagcttgcggttgcttcagaatgtaaatatttcttctgcaacataaacaagtgtgccaatttgaagaaaatcatacacaaaataagtcttatctaaaaaaaatgtaaacaaagatgatttaatcaatattgcaagagaaatggagtcagtctactgtctagttgtgataaattgacaactgcccacatactattagcccaactctagtgtcagtattctatcagatgaatttctccctaagatgaaagagaaataggcacattgaaaatccaccaagtgtgatccaatgaaaatacatactctaatatcaatttcacaatacaatgaactaatatcataaactgtcaccagatgtatttatacagtagattcgaacctcagctcgtaagttctcacccctccgcattgccatcaagacttggcgaatctagcacacacaacaattagataattagttcaggtaggacaaaggtagcaccaaatttagctaatttgttgatcaaatttcactttatcaagatgcttgttagtacttagtgggctgctacaaaatatcttttctgctgaaaagtaaattgaaaaaggttatgaaaaaatgagacagcactagaaattagacaaacatcaagactgtaagtattatcaaagaataatatgaatctaaaaaattgtattatttattcacttgtgcacatttcttgtttaaatggtttaatcctggctatatgagcatatttttataggaaaatcatcatacctgtatggtgtagccttcagataatagcacaacatattacgtacaaatgaaaacagaaaagatacctcagatattagtcgacgtctcccctcattgtcaaaggttaatgctcgcagtgaatggggaccaccagagagaacatcaccaccccttctttccatcaacaatgctgttcttgcgtgtgattggttgctgctagaaccctgggtaaatgaaagaggaccagaagaagatggggcagaatggccattatgaacactagatgcagagctaattgatggaaaaagggaccaaggactgaactctgacacactctgcatattttctgccgggacttcatgattaaaaatccagctagggttagggggagagtgaacatttgaactagatccaatccaggatggaggaggtacacctctagaattgttcacattgccagatagtgtatgccaaccagtaggttcgtgtcctgaagacgcaggcacattcatggggtgttccatactatctctttgaaacattctcaaattaaaatcttcgcgcacagctctttctccagagttataagaagttgaagatatggcccctctaggattggcagttctgttccaaggaaaagaatggatgcgcaaggcaggtgactggttccgagaagtgccagaattagccgaagatgtcactccagctgttaacctcaattccagcgaatcattgattgagtgagacccaggtgcttgatgcagagaagaatgattatgatgcctagcactccctgttgatggtaaattgagaggtacagattcctgatgctgtagatggctcattcttctatcgaagtttcttagaggcctttccacattttctgcaatacttatcaaaggaaatgcattgggagcttcttgtcgcgcttcatttgttgcattctgaaataatggaggattagtaacaggaatatcttctataagtgtagaatcagttaagccgctagaagcattaagatcaacaggatcagtaggccagcaaccatttccagattgtacaagagtgcttgagcttcctccagagcacagttgcctagaactaccttcaagagcctttctcttgcaggaaggaccccaattaactaaagaagaacttgaattagcactatcaccccaagccatgtatccagagctttcagatgaagctcctgtgtgattacatgaagcactgccaaacaatgtcttttctctgtctatcccactagtattgttggcattaacactactaccagcttctttgcccttcccacgatcagcagcattagctacatgccccatatctagactaatattctggctaatatgagtagaactggaaccttgcaaaaaggaagggtgaactctagattgattgccatgtagattagtatttgaactaacaggaaaaattacattatttggtttgaattgtctttcctcagacctgagatcatcctcggtagcagcactatatgaagaagacagcccatgttctgattttagaccttcatcattgacttggttgatcagattgagtctagaactagattcaccagtattccagccactgaagctctgaacattatgaccagtaccacgtaaacatgcagtctcaccagaagatcccctataatctgacaaccggaaatctactgcattttgcacatgattcaaggaagactggtggttcatatcagtgccactagaactgggcccttgcatcatactaacaattgctgggaacgacccaacagtcctcctttgtccttgcatcagaatcaagctatcccacctaaattaatcaacaggaaacttataagattctcaaatctcaagctataagtaaggtgcacaagagtcatatatataacctatagatgacaactacggctgtgaaactaaagtgtataccatgctttgccagagatacaatcagaaattagctatttaatcaatgcaataaaatgaatgaggtaagatatacaaacattagagagtaaaatagttcactgaaaagcctaaaactgctctagtaacacataaatcagatagagctagcccagagtgcttaacatgcatttttcttggacaaaattattgtttcagagtgatggtgcacatacatcctcaacggaagatttagacagaagagaaacaaaaaggaaaataaactttttacaggtagattattatgttgattactgaatatttctgctagatacccatcagctagttagctgggccaagatgaatagaagaagaattaaggcacgttcttgtcaatagaattaatggaaaattaatagaattaatggaaaattttatgggctttaaattagctgcgtaattgtacattttgtaatttttattctctccttaattaggataaatatatatttatcagttagctaatattttgggctgaaaatcagcatgtcagcttgcaattatatactatttatatgagaatttgccagcagaacacagttttctgagtttgacaaggtagcagtctggcttatggtcctagcccagtcagagtttttctctcttatttctcaacctagttccagatttcacaatttttgccattctgtctcagttctgttctatttttatttttccagtccagtttggttctttgtcatgtcttcaaaaaaactaaatgtcttaatggtttgccttaatggcaagaactacccagcctgggcattccagttccagatatttgtcgaatgaaaagatcttcagggtcacattggtgacagcgcttctgctcccgataaagaaaaacataaggatgaacatgccaaatgggcgataaaagatgctcaaaagtcatggtgtggatcatcacttcggttattcccaaaatcatcttaatagctaatattttgggctgagaattagcatgtcaatttgtaaaatactatatatatgagaattttccagcagtagcacagatttctggcctactgttttctgagtttgacagttattaatacgaaaggttgagagggaagatatctttccatttgtgagagaatttggccctttgggcattgggaggtgcagaccctcaaagttcaacaatgagggtccgtattcagggggaaagtcccttattttttcaaataagataccaggtttctgtcaactggtatcagaactccaatgttggagttgtgggtatatcttaaagctgattccagaactctaagaaaaaggagcctgagcgtggctgattaatgtgcagtagtattttgataacaggaaattatcgagaagcaaacaggaaatgacaacaattgaattgttcccatgtcccaatgggcaaagtccagcaaaataaagaagaccttgataatcatcaactatgaccatgtgcactagtgccaactcagccaagggatcttctcaatataactataagggctccaatgctctgtttcatgaccactggagcaggaggtgggctgcagggtaagtttgacttaagtcaccaacaataccatgaaaaacaaaggcactagaggagcaagggcattcacgtgtttgaccctggagtaggaggtggctgcagggtaagtttgactaagtcgtcgtcgtggtcttaaatatcggtccacaacatcaaggtatttcgactcaccacaaccacaattgcagctgcatcagccgcattttcctgcaatgtaaaggttttctaactcaccacaaccgcaattcaaaaccatggtcatcacgcttcaatcaattagaacttcattgggactttatttcaggcagcagccacaagatgttcaccttgaggacaaggagaaactttatgagaggagtattcacagatatccattagttagttagctacatactctagttactagcgccaagatgttaaaaattaaagtgtgctgcctataaataagaagacgggttgagggggagagatatttgatattgtgagataatcaaggctcttgagcattggaatgtgcagacccttgaagttttgcaagtgagacactgtattcaagggtctatcctgcattctttctaataaggtaccagttttatgtcaatttccacgaaaattttacacccttcattccaagcatgacaactgtaataaactggtaggttcctcactgatatgtgccaagtttccatgaagtcatgaagagacaggagcaaaatagggagaaattgccaactttaaattcattgacaactattggattcttgattggttaaaaaagacatgactagtagccagtgttatgaaatttacagtagaaagaaaatgtcaactttttttgggcggttataagaagatgcaagcacgtggggaggagagggagaaaggtgccctcatggagagttcaacctctgaaatcaacgtcacctgagccttgaatacttgggcagattgggagacaagttcagtggcgaaattccatagttttgacaacagataatcttactgcaataacattagcaggagctaggatgtgtgctcaatgaatgtatctattaagagggatgagtgaggaaaattcatcatgcattcaactatttgttaaaaaatcaacttctccaaaatcataagctattaagaaatgtccaccaatccatttactttcggttgaaaatgtcaagaacaagaaattgcaaaagctaaagctgttagaatgccagggaatggtttttaatcgacacctcagaacgtattaaaatgtacaaagtctatcttaatgcaaagcttttacttcccctaatttctcacccatacccacgagggtaataatgcaacactcaatgtctgcaccctaagacaccaaaactaaaacactacatgagcttgaaattaatcaggttaaaatggagagggtaaagatcaaccagatcatcaaatgagtgaaacttcacaatacccaaccctacattcataggatgcaaaatccacctgggaaatcaaaataagccgaatccaaactaaaaaattgaaactttaataaaaaaatttaagaaaaaataaaggcatgccttcgaatcgattaaaaatttcaaaagggtagggttgaaattaaaaaaagaaaaggcagaaagaaagaaataagcaaaattgaggacaaaaaacctaatggtcgacgcgatcctccacccccaaagccggttaaagatgtgtgagaacttgccaacggaaaaacccaaattcagatcattttcaaagccacagtaaacaaaaagggatttttttacaactataatcacctttagcacaagcattaatgaaggaaattgaggttattagagtttggaaatggagaaaattattaccagaaggggatccctggattgattcaaatgggtgttgggtttgattgggaagcgatgacgacgatgatgatgattcttcagctgtttcaactctcaattactgttttttcttcttttttcttttattaagttattattattgaacagaagagggcaatgagaacacgacaagggagagaaagagagaaacatgagagagagagagagagagagagagagattaaagggacagagtacctagcgtacagtaatctataaacactaatttaagagatttttgtaagagagagaaggaacctagtgtttcacattttttatattaacgcctttgggttcgggtctcaacccaactgtgaaattcgtacacgtagacagatgctgtcattggtttaattatgttgctagaaaatcagaagttatattattctcattgatacagaatattctctttaatcttttttgacgaataagtaccatggatgctagctagaatttaatcttgatatcctagttaattatgagacacaaaattaacttatctcctaactacattcatcctaaagtttggaattaaggaaagacactgtctacagttggctaaaataacatggaaatcagaatggcctactattttggagtctatggtctttaatcgattggcaataagtcttaaaaacaacattattcagctcgagttgttgggtccaaataaggctttgatagagagaaaaacttttgcttctgccagttgaggaaggtcatcaaagaaatttgttcgagctctaatgaagttaccatggtcgtcttgcaagcacatgttgatgtcaaagcagttgtgatccttaaagatggtggcatcaagattgcatttgatgaagtcgaaatttggtggtgaccaaacttgagttgctgctggagtagtcatgtgagaggatatgacatgagattttacagcaaagccattcgtgaaagaattgcatggctagcgaaatgacagtacgtagctgagggggtgtatacattgtcccatattttctgatttctgtttctccagatggaccaatgaataacaacaatttgatctttgtcttgaggttgaagctgatgaagcaagtcaaagatcatctcgttgaagccttctacagtagttaatctgcgttcagaacgatgtcaaagacctgtgattctccagaattccttttctttgtcccatgagatgaaaatgtcaattcattttttaaattttcggtacagaaacaactataaagcacttctatcccaagatatatacacttgtaatattttctaaataagtttgtaacagaatttaatcaaaagaatgtataggcttttaaaaaagaacacttattttacaataagagtattacatgttaaatatttataaatttaaagaaaataaatcaataaaaaaattaactccacttaaacaaatcttgacactccaaagtccatacaaatcatattaaataaaatatgatgaaaaattactcattaatttaatcattagataaatgaataaaacttatatcttaatgctacattgtttcaaaacatccataatcctaaaattaatagtagtataaaatagagacttaagcctctcatgtagcatcatcatcataaccttaaagagactcacatgcaagggtaatattctgcctaaacacaaaaaagacaaacacacagagaatgggatacatctcacaataaatttaaaacattaaagaaatcataaacatataaaatacatttataacaattatgttccacaacacaagtatgtttcattcaaatcaaacagttcatatacaaagtcacacaccaaatgcaatgcacattagacccgtacactcgtacgcatgtggcatcattttttagaacactgtgaatgtagcccgagaattcatgtagtaaacgaattgtcacacaatggacaactcgacactatcactctcaccaagatgacaccgttgacgacacgttagggtgttttggccttgcaaggatactccaacacatgtggtcaacttaagcttaatagagatttaaatcgttgcacccctaagattagagtcatacgtcaactcattcatgacatccttggttaggttcataaacgtctttcacttcaaagcacatatgcacaacatgatgcatggttcatagacaatatgcacatagtttatttttgaaatcccttgtagattcttattccgcagggattaggttctcctaacatttttcacaaaacatatgcaagttattttcaaatcagcttttatcttatattttctctaagatagaagctgatcttggtttctaagatatatgaatgaattgtagctttttcaacaagctttccaacgactcaaaaaacacctcaaaacgacaattataacttaagatatgacatggtatatctagggttgttatcataaaattaacactagacttatacaacttttcaaacatttaactataaaaagttaatctaatacttttctaacaccaaatataatataataaagacaacaaaaacaataatagtaataataataatatatacaaaatacacacgtgtataggaatacatactatcacaacacaagtacatgtttaagataaaactaataatgcaaaataataataacaaatatttataaaaaaatataacaaaataatcataataagagttctccttaagatatattcctaatactcaaaacttggggtgttacaacaacaattagatggtcacaaaacaccctttgagacaagcctttgtttgtttggtaagcatcctcaaagggatctccataaaaaaatgtttaatctttggcggaatatggagatttcaaatcaatatccaattacaattagcttttaagtgttcattctctagcatgttatccatgatatcatggtaagttgttcgaacagtttagttacccaatgtactaaatttccaaagtaatttgtcattagtggaaacattcagaagaggcatggattggatatcaaggagtcatcatgattaaagatggtatcaaaaaaggtcagtcttccaagtttgggactcatgattgataaggtcaccaacagataaacgcttagtgccacttgtaggaatggtagataaaaaagaaatggttgtggatttcaaccatggctgccttcaaatgttaatagaatgaacattgctaattctttgtctcataccttgtctcacaagtacccatgaagcatggatactacatcaaatatagcttgtattatgctcaaggttggcatccaagaaattcacttgtgaaaagtatttagctttgaaactttgcaaaatatagtattttggttggacaaaaatctccaaccttgcttccctaacataacaagattgaaaacatgaagataatagaagttcatgcccccaaattctttcttcatagcaagtttgttccaacttaactaattgatgtctttctttatttgtggaaaataagattattttattttattgtgattatgatatttatgtcaatctatattggtctctagtcttatttcttgcacggactaagattaaaagaagaaacaaattttacaaaatacttgttatagtgtaaggtttattcctttgttattttatgaaaaaaaaaatagtttttagaaatatgtttaaattattcattaaattattatctatgattttataaatttaaaaattgtttgccctttaggaaaggaaaaatctgaaaatattctataataattttttatgtttagaaataaataaaaaaatctttaaatgttactatactctataatagtttcttaaaggttttaatttgttttaaatgattttccactttatatataaaagaaaataatattatttttctttatttttcctcttagtatatttcataaataaaataaaagaacatggatggaataggaagttaaagaattagattaattatttctttaaaatgaaatatttaataattttcaattattatttaaaatgataattattttaaaataaaataaattttttgtggagaaaaatgagtgtttcaagagagagagaatgcaacacaaagctcatcgtttctacttgaatcattagatgagggcgatgggattgttcaaacaagatttatttccctaacaaattgtaaagacaacaggcacctcttccaaagagatcaaattgatttattagcaggaaatatgtttgcacattgatgagtgaagtctttaagatcgatcatggtttctccaaagggatattaaaattgtgaaattattggaaaaaggttttaacttttacacaatatgatatcaactcaagttgatatgtaagtatgttatactcatagatattggacatggtttctacaaggtcattctacttgcaacttttaccgtctcaacatataaaatgttattacattctatgtgtgtcaaagtcattctacttgcaaattttaaatcaatttcattttacattttagtttctgaattttcttctaaagtaaggaattttttaaattaaaatatatgtaaaattgaaaataacaaaaatgacattaaattcttaataaattacttgattaagcatgaataattaaataattatgaaaacttaagttttgaaattttcacaaataatcattgaatttattattctaaatctaaaacaattttaaaaatataaaataaacattnnnnnnnnnnnnnnnnnnnnnnnnnnnnnnnnnnnnnnnnnnnnnnnnnnnnnnnnnnnnnnnnnnnnnnnnnnnnnnnnnnnnnnnnnnnnnnnnnnnnnnnnnnnnnnnnnnnnnnnnnnnnnnnnnnnnnnnnnnnnnnnnnnnnnnnnnnnnnnnnnnnnnnnnnnnnnnnnnnnnnnnnnnnnnnnnnnnnnnnnnnnnnnnnnnnnnnnnnnnnnnnnnnnnnnnnnnnnnnnnnnnnnnnnnnnnnnnnnnnnnnnnnnnnnnnnnnnnnnnnnnnnnnnnnnnnnnnnnnnnnnnnnnnnnnnnnnnnnnnnnnnnnnnnnnnnnnnnnnnnnnnnnnnnnnnnnnnnnnnnnnnnnnnnnnnnnnnnnnnnnnnnnnnnnnnnnnnnnnnnnnnnnnnnnnnnnnnnnnnnnnnnnnnnnnnnnnnnnnnnaccgatttttaagataaagattttgtcacttctataagtctctctttgtttcttattttgctattgtgagtttgagaagaagaaaaaaaaaacacaaaaagtgataaacagaaattaagaagattttttctattgtaaaagaaatttgacaaaaaggtaaattttatttttatatgaaaatcatatatattgtccttatgatttctatagtttttttaaatgagaatcctaagaaaaatcaaaattacatttttagcttaaaggaatatggatccaaccaagatacttttaaatatggtattctccataacataacnnnnnnnnnnaacaataattataacttaatatctagtttttaattttgtgtttatattagcatattcatgggaaatgatatgattaatactattaagacttgaattttattatattgtttgatctttgatcaaatgtcgttacgttaagaaattaggagatgatgatactttttgtagttttgtcaaaatttcctacgttgtttagtatcctctgtttttaaaaaattatcctctgttttaaattttcttatcctttgttttaaaatattttcatgtttttctaaaaattaagtttgcaatctaagtcactgatttgatgtctaccttagtatagtgaacctgcaaatagtagaaaagcaaaagcaaaagcataaaagagatataagaaaaccaaaaacaagcagcagaaaaagtaaaatgcaaagcaaattaaattggagatgcaggggatcgaaccctgtacctctcgcatgcaaagcgagcgctctaccatttgagctacatccccagttgacaatgaagccgctaaaatcattgaaagttattttagaaataaaatctcatcaaaactgtttgcttctaagaataattcacacacaataaatttagggcggtcttttaggttttaggtagtgattgttacttcctgtatttaagatgaaaaattaaaaaattagtgttaattttatatttttatattttactttaatttaaatattttatctcattacatctcttttcactttcacacatttttcattttttaacccaatcatacttttaaggtaagaaagtaccttttagaggataaaatataaccacgtattaacttaaataaaataattaaaattataattaattatatacaaaataaatcaataaattattaaactttcaactattaatcacaaaatcaaattctctaattaaaatgcattttgtcttttgaaagtaacatcctcatggtagagaaattaaatattgatggtctgtttgtgtaacacctcgtatgcatccagtgtattaacatattacttaatcagatttagcgcaataattaatattaaaccaattaattaaagcgaacccacggaagcgttttcaaaaccgtatttcttgattcattatgtatggtctgtaaacataaaacatagccgaatgcccatataacacaatagccccaacgatccagataactcaaagcatggcagataaacaaaaatatcaaaaatagatatagcaggagacatataaaacatatacataacatatgcacaagcatattttccctcacaggggtacacaacagtgacaatacattaaccatcagccacagagcttccaaaatattgtcaggcagctacacaaaggctgtccctactagggcctcccgctctggtacctatcagctcggccagaagcatcacctgtaaaacaacatccccaacaggggtgagataaacatctcagtaaactcggggttcttggaggtctttcctccccctggttcacttccatgacatatggtattaaaaattaacataacactaacttgccatcacggctctcataaacaatcacagatataccatcacactaaatcgccatcaggctttcatcaacaaataacaggtatatcatcacaccagtgtcattccgttggacatcaccaacatcaggaatgcaacaccatacaactcagcataactatatgctccattgcttgaggaaaaccactcaggactttactcatacatatatgactcttctaagaaaatttcatccactcatggcaacttctcttagagatacaacctatacataacctggcctgaggaagatcatccactaaagggcactcattcactcaggactttcacacactgcctaagggagatcatccactaaagggctctcatccactcatgactttcatcacatactacctggggaagatcatccactgaagggctctcattccctcaggactctcgacaactacctgaggaagatcatccactcaagggctctcattcactcaggatcatccactgaagggctctcattcaatcaggacttacgtcacgtccagggacggatccagaaaataaattaagggagggcactcaatagtttaaacactaattctatcctaagctagcaaaaagtgacaattttctcaaagtgatttcctgcttgttttaaacattacaacatctcaaagtaatgaaaagaaacttatagctaacctatgctgctaagttgctctgatatctttataaggtcagaacccccaacagctccaaccgttacaacctgtacccaaacaacacaaaattcaacagcaaaaaaagaacaaagaatatcagcacagatttatgcatggcaaagtaaatgctgaacaaaaacaacaagaaatgaaatacactttatgttcaaaaatttccaaatcacacacaccttccgcagttcctgcatgaatgtcataaaatcatgatttgaaatatctctgccataaatttaattgatttggaatatctttttcgcaatagcctctaccattctaaaagcccaatatatagtatctcttcatattattattatttttcaatatttttctttattcacattttcttttttcatatttttcgcagcagcctctactttgtgtaattttatattttatttcttgcttgattttcttcctccctctttgctctaaattatttaacattaattataattttaacaatatttggtaacaaacctaactcctaaaatagattaagcagaaccactgaatcacacaacttaggtacaatatttttctcaaagagcagagtcacaaaccttccggtgctatggcagtggcgtgacagtcggcgtgaagagaggagcagaagttgggaacgatggcagactggcggttttggacttctagttcacgtggaggaggagcagagttgaggaaggacggtgctgccgacgtggtccgcgcggataagtgagacagtggtcggtgacggtggctgactggctgcattctgttcgagcaaataaggtgagaaaggagtgaaggaaggagtgaaggtcgcgtagtgcacagctttcactctgcagagcaggccaaataaagccacaggggtatactgggagaaaaatttaaatgaaggttatattagtaatttaccttgaaaattcaaggggggcattgcccccctaactttcaacgtaggttcgcctctggtcacgtctactctattctactggccagagaatctcaacaacctagaatactatcacagtatatatatatatatatatatatatatatatatatatatatacttgttctcaataacacagtacattatcacaatgtacatcctacaggttctcaataacatatcacactataactgtgtatctcataatcatatacctatttatttcggcattcacataatactatcacagtgtatatcataatcatattctcaacaatatagttccctataattcataattccaatacacatatatcattatatacgatacccattactccctcggagtatggtggaacacagttagtgggaaccactcccaagaacaaagagcttacatgctctcaacgctacaccagctctcccggcttcgtggtcacaaccaccagcaacgtcactatcacaccctacatgaggcatacaagcaatcaatcaataatggtcttcaaccgttagaatgaaagaaaacgctattcctttccattaaaacctctatgttctctatcttagggttattcaaagctaatcaccttataggcgattcacagaccctcagcaggatctatctcagcttaaccaaagcactagagtccctctaagactctgcataagttcaattcaatgatctagcagatcatatttcaacaattatccaacttggctaaaacagttatatcaacacattttcaccgtttatttagccttctgaacatcttttgtaaaggcacttaggctcatatttatcataataccgtcaatttactcaacattcttcctactcatacatatctcagggtcaaaaccaaacttcatcaaaaatcatgtttcaaagttcaatattcatcagaacaaccccctgagcatacttttctaaaaaacccaagcctaattccaaccctaacacaaatgggttactattcatcccattaccaatttcacaaatcaatcggtaaaacttaagtttcttacgtcaaagcagtcgagcaaggctagaggatcacttctctaagcttcagcgcccttgaatcgcctcctttctcctcgaaatccaagctttgttaagttttctagagaactagatctctccgattaattgtttgaccaaaggatgaaggtttatgaaactccaaggctcatcaatggcggaacagggccagaggaagaagaaagggggtttttgccctcaaaaatctacaaaatggcattttataggccctcatcacgagtcctagcgctactggcactatccgcgccagaatccagagaaaacgggttttttggagcacttctagcgctaatcgcgccacatatcaaatcctggtgctaatcgtgccaaaaacagtgaaaattggccttcagctacaatgccacgctatcagcgtcagataaaataatatatttttaaaaaaaaaacttgggttattatagtttgccccaactctaatccaagtaatgtcagatggggctaattttattctatttcagtagcttaaagtatttattcacatgtatgatgacctcaagatcttcttggacccttttaactaacaatgagttttattcttgcagcaaaaatatcaggttgctagtttaatagcaaaaacaaaaagttaaagatgatgaaaaatcgatggaatgataatcatgcatgttagataattaatttttttatattctaagtaaggtatttccataatcctaatttcttgagatatagaaatatttgaagtgagttttatctctttaatcaaagtattctttatacccatggtaaaaaaacaaatatttatcaacatgctaaaaaaattaatagatgcattaatttgtttgatcttgttggtgtcagataattagtcatacatttaagttgtttgttttttatgatatcttagccatttaatcctttctttttatttgtttgattttgagcaagttttcaatttggatagtagagtatctgaatgctttttttgttttggtgaatgatgatagtttatttttactcannnnnnnnnnnnnnnnnnnnnnnnnnnnaaagaagagatgtcttctttaaagtggaaagggagatcctgcatataatctcatatggagcttagctttgacatacatcatatcatttagaaaactctcaatatgctgctcctttgaattcgagtccctagtaggcatggcaacgagacccgagtccgtgggtacccgtcaaaacctgccccgattttaacggggaaaaaccgaatttgttattgatgatacccgccccgcgacaaaaattcggggacgggggcaggtttggtattgatgataccctccctgcccccgcccccgcccccgccataattaaattacaaatttacccttatatatataagaataaaatcccgaaatcctatcccttcccctcatttctcattctcgactgcgttgaaccttgaccaacaactttctgaattaattccattttggaagctttgttgctacaatggacctctactctttgttgtgttttattttaattttggaacaatatatatttaaatgatattatattttgggagaaattaaatatgtaggtccataatggttttaattaaattgattgattttctttaataatttttaaattatgatctcatattttgaatgtgggtttgttattaatttttttgttacctagtcaactttttttccgtttttttcaaaagaaaagtcacattatttttttaattaatagtaggggtggggcgggggcgggacggagaaaacccgaccccagcagggacggggatgagtctgaattttaaaacccgacggaaaatgggacggggtgggggcgggttttaaaggtggaggcagagacggggaatacaatacccacacctgccccgccccgttgtcatgtctagtccctagtgctaggctctactgcaaaaagtttgcataactatttgggtacacaaagtgtacaatcctataaaaaaaatggagtgtggagatgatgccccaaagggagagagagtacataatataagaagactgattttcttcttcctttttcgatatggcaccaaattatccaggatccccttcaagattttatcattcagttacttaaatccattaaggcatgcaaggaaaagtttacaaattatgctgttttcgttatcgaattcaaatggagtttactcagtaaagtctaaaatcaagtttaccttgaaagggacaagcagcaacattatcaaattagagaatgcatatctatttaaaacattataatttactaatcaaactaattagtaaaataagaaaataagaaattgaatgcaaagcgaaattagaaatgagttcattttatttatatatatattgtgatatttttgtcatattaaataactatgaaatagtttttaattgaatattttcttttaccacgctaagtatactcagttattcacgaatagatggcgttaacaaaaaaaaccaatgtagttaggaattatcaagagaagcatatgcacctgactataattaagccgtgggaaagttggagcaggcaaattggaaactttcctatcactatgtctttgactcgtttcacaacgactctatattctctaatcattttgatttcaaccacttactttcctatcactttgactcaaagcaactgacctttaccttctattagtcttcactcttcacctaacgttgggtctcttttttccttctcagttatcttactatcctttaaattttgtgttcacgtattactttccgggtgtgaataaggattatctttaatggtagaatcatttttgaatttttaccttactttgtgtggatcctttatactatatgtaagatttaaaaatttatataaatttttacttcattagtaaaactcattttttgttcttaacttatattttgtaagttccataatgaaccccacatttttatttttttgtttagaattatttttaatgtaaattaaaataattatttatataaattttaattatgaaacaataaatacataaatgataaaatattaaaaaataaatttattttatatatcattaaaagttaaattgatgaaaaatgaataacattatataagtataaaaaataatttttgttattctcatgtctaaatagttatccattatacttcatcaagttattaataaatttttctttcacgaatatgtctatcaaacatggtgtcaattaaattgattcagatccatgtgatcaagattgaaattagaaaaattgagattgagaaattaagaatgagaataataaatgttgtgcacaataagatcaccaataacacaatttatagcattgcacatgatcacattttacagtatttaaatttgaaaaaattacaacaaaaaaaaaatactgcactagtaaacgattaaatattttgatgtgaaaataatgaaaattgtaggaaacgttccaaattacatctacaccaataaactatttgataaacaattagtcagttatttgacaagcacttgtagaaaatgcaacaacaggaaaaataaaacttacttacatggattcctgtgcccataaaaaattacggatccacccattaatggtaatggaattgtaaccgaaattttcctctttgatatgatttactatgccttggtcactaatgttatcctaaagatctgaccaattgattcacccatgtatatgcctctttactttctttttctattttccccacccacccacactctacaataccccacccttacgcctaccctttctcttctatgcccctccccttccacaatgggaatgattcttgcacataagaacccaagctaagaactagtagtaaagatggacttcaaatttttgggtccatcatttatgttgtataacataatttaatgggggagatcattcaagtttaactgcttaactggtagaacctattagagggatagagtaatggattttgtaaagtagtccctaattacatttataaattgtaatgctattaccaagaagacccaaaatcaatgtattacaacatggtaagatacactttgaatatgagactatttcagatctctcattatgtaccactagatatactactttttaaattaaagactaggattttttttttctatttttcccgatttaccctcttcctcatgattgttcccttctatctccatccaaattcttcctctacctcaactaaaaccttaaaaaaaatgtcttcaaaaatcaaaatataaatagaatctcacacatataatgttaaattccttaataatgtgacaaatcatttcgttgtcaacatcactattatgtcattagttaacgttgctacttaacaatagaaactaaaaaagtattaaattttataggaactaaaatcaaaagattatttttaaaggaccaaaataaaaataaccctattttttgggggaccaaaatcatatctaagtcaataaatttttgtattgtttgaaaaatgatagaagtgagattagaaaagtgtgtgtgggacataaaattaaaacttctctaaagtgtggacatttatggtgtttttttttgtctagatcataaatatatttcattggagacaatcatattnnnnnnnnnnatgagactcaaacaaaaatgtttgtttaatcaatattatgcttattattatgtttgttctaacatatattttttttttctctttttttaagttcttattgtaatattatgcttcaaatgattaaaaaagggaaaaagatgaagattaaaatatattttggataatagtcattttcgtctctaaatatgtggaatattaaataattcgtttatgaatctgttacataagttctttcattaacagtaatagatgaaagttaataaatgaatatatttattgtatttttttcacttttgttgactataatataaatttttatctttttaatactaatttgttaacattttacacatttaagaataaaaataactatttatccttatatatatatatatatatgattcactataagttgttaaattttaaatgagctttaacaattggttaaatgacacactcgaagtatgcaagaacaaaaaaaagtctcaatgcaagaaaaaattccagattttttttaaaatttttgttaaattttaaatgagctctaacaattggttaaatgacacactcgaattatgcaaaaataaaaaaaagtctcaatgcaagaaaaaaattccggattttttttaaaatttttgtttaccttttcatttagcactctttctttcctactttctgctgagcacattcctacctataacctattcacattttaattttcaaattctcctacctcacttttttggctttttggtataactacaactctaccaaataccaccaactgcacnnnnnnnnnntacttacctttcacttctacttttttttttttacttctttcaatctaaataatttgaaaatttacccatttttgactctcttctcttctacttctttcttctcaacatctttcatgatccaaacaaagcattagtgcttgtttaaattaaaaaaataatttttatttataaaaatattattaaaaaattacttcttaaaaataaactaattgaaatgtactttaaaattgtatattagtcttaaaaaacgtactctaaaatgtcatacaataggaattccacttgttatgttttttttatcaacaaatactagtagttagtttgttagtttttgtcaataatggaaaaatttgaatcccatgattattccttccatttttttcatggtgttagacagattatgtcacaaatacaaagtttagaactgaatttcacttctgttaaattgaaatttaagaaagagatggggatataggacataactaatgatgaactaccctttggcaaaaccatactaccaagtcttgcatgcagttgcatccaatcggagtaacggcggaaaaacaaaactcaaccacacaccaatattttactcttatattacatttcaaggatttggtaaactgaaatctgaaacattagaagaggactcactcttgcacgtttatacacagggccgtcaccaaccacacaccaacttcaattgccatgtataattttcaactacacccgtgggacccaccgttccaaccagccactcgttgatcaccaacaccccattttcgacctttgttttgtttgtgaattgtgatttacacaactaagaaattaagattaaaaaaaaaaacttgaagccaacactttattacttagcaagtagcgataaccttataccaaccaatgaagcataatttttcttaagttcaaatgtttccaacttattttaaattctctctccaataaaatatcaatgatctagagaaaaaaccttacttggtttgtgaataatatactgtttattgaaaaacattaaattttcaaaactgctcgagttatgacagtgtttggcattaacaagttgaagataaatccttagaattatctggagttaaattaaaaaaaaaaaaaaaagaagnnnnnnnnnnnnnnnnnnnnnnnnnnnnnnnnnnnnnnnnnnnnnnnnnnnnnnnnnnnnnnnnnnnnnnnnnnnnnnnnnnnnnnnnntatgtcataataaattaataattaattgaaaaaagtacaattaagtggccgaataattaactatatttcctgcactcctgcagggaatcataaacatttatgttccatttaaaatgtcataattcattaaaatgatgtcataacctattttgataaatgcagaaaatcccctaccaacaaatgaagcaaacaagagcatatggatctattattaagtggagcctaaatgcctaaaccatgctgctcactgcacaagcattcctattagaaaaatctcaccaaccccggaccggacgccaccggttcaaccaaacatcacacggttcgaaccggcattttccttccttatattaatcaccctcccacagccccccacttcatcaagctccaataatcaactctttcaaaagggaggagaagaggaaaggaaaaaaaaacgcacaaaggattattatagcaatggcagaacaaaaccaaaaccaaacaactgaagctggaaggcaccaagaggttggtcacaagagccttctccagagtgatgctctttaccaggtaccaccccaattgcattcctttgttaaaaagaaaaaaaaaatattttttcttttgggtttttttatttataaaatagttatgttgaaaacaaaaatctttttttttttcttatgggtttttgataaaatggttatgttgtgtttagtatattctggagaccagtgtctacccaagagaacctgaatccatgaaagaactgagagagttgacagcaaaacacccatggtatttcatttttataagtatttcatttttcaattgacattttgacacctattaatatgcttggtttggtttctctgctcatggttactgatttttttgttgaaaacaaacaacaggaacatcatgacaacctctgcagacgaagggcaattcttgaacatgctccttaagctcatcaatgccaagaacaccatggaaattggtgtctacactgggtattcacttcttgccaccgctctcgctcttcctgaagatggaaaggtatgaaaagcagagtttatcacccccaaagaataaaccttttttttttttctctaaaaaaacaaaatttctgacaaaaccattttctatgcaattatagtcaagtgggtatttgttaattaataattacatccaattttgggaaagagtttcctattttggcatcatgtgttaaacaaaaaattgtgtaaaaatttgcgttgttgcttgtacttggtgcagatcttggccatggatattaacagggagaattatgaattgggtttgccagtaattaaaaaagctggtgttgaccacaaaattgaattcagagaaggtcctgctctcccagttcttgatgaaatggttaaagatgtaagtttttccatctctcaatgtccaatggaaaaggaaaaagaaaaagaaaaatatttttaatctctcaaatttaagatctttcttttttaatcatttacattcaaattcatattttcaaacttttaaatttactaaatgattttttagtctttttatggtaaaaaaaatcatcatatattgtgcatcaaatcctcaaaaatcagtcaagcaagactaaaaaaacatttattgaattcaaggtaaaaaaatgcaagtttttccatcactcaatgtcccaattgcaagaagaagaaaaaaaaaagaaaaaagaatcaatttagaggagtaaaaagagggtaattgggtagtgattgcgtgtggtgaaatgcaggagaagaaccatgggagctatgacttcatctttgtggacgcggacaaggacaactacctcaactaccacaagaggttgatagaacttgtcaaagttgggggagtgatcgggtacgacaacaccctatggaacggctctgtggtggcacccccagatgctcctctcaggaagtacgttaggtactacagggacttcgtgctcgagctcaacaaggcactcgctgtggaccccaggatcgagatttgcatgctcccggttggtgatggaatcactatttgccgtcggatcaagtgattctgattttctgatcatcacaatcgtggaccaccgttgcttcttctgcaccctagtgatgattggtcatcattcagtggcacctgctaatgcatttaaaagcaatcgatacttttccttttattttttttttcttcaaaatatttgtgtttgtacttttcttttctctattattcatgtggaaaacggtggacaattatatgcaagtgactttttccttatgtgatttacttccaccaacttggtttattgtgaagcccaattaagtgttaaccttggtttattagaaagaggatatatacgtgtgctttacagggaggaggatggaattgaggggaattgaagggtggatgaagaatgtgtttccactttcaaataaattacattgtccaaagttttttcactttctctcattttgaaatccattagtaagaatgcaagtattgtgtatattttgtgtatttaaaaattatatgtttaaatgaaacattagttatctgtataaattataatgaacatcgatataaatgaaataaacttgcagtaaaaaaaaatgacatagactttacatttaggatttaactactgttttgatgatggcttatcctttagagcaattgtggtggagaatgactgccaacaattgattcaagcgtggaataaatatgaatgtcactcacatagtgattttgatgggattttgggggactgcaaagtcttggcacaatccgttcaaccaataaccaacacagcctttgtgatgcaagaaaaatattggatagaaaagtcacctttccaagtggactatgtctatggatagtagagcctctgtacagcattttctcagttggtgaatttaatcgtttaatcatttacagtttgtttgggtttgaggtgagtagtgggtttagggtggatagaataaagggtaattgggtaaatagtcactttcattgttaaatgtgtagaacgttaataaattcgtcttcgaaaaataaaaatttaaattttagttttcaaaagtaaaaaaagaacgataaatttatttatttgttaaccttggtcgttattgttaacaaaaaagtctatgtggcaactttcttgttgctattaataaaagatcctatgtggcacattcaaggatgaatttgctagcgctttacatattgagagataaaaatgattatttattcaaaatataatttaatcattatcttccttcttttatattgttacaaacataacattacaataagtacttaaaaaatagaaaaacaaacataagttaaaacaaacataataataaacataatctgtctattattctgaaatttctattgtaacgatactttacccaaaaatgagactcaaacaaaaatgtttgtttaatcaatattatgcttattattatgtttgttctaacatatattttttttttctctttttttaagttcttattgtaatattatgcttcaaatgattaaaaaagggaaaaagatgaagattaaaatatattttggataatagtcattttcgtctctaaatatgtggaatattaaataattcgtttatgaatctgttacataagttctttcattaacagtaatagatgaaagttaataaatgaatatatttattgtatttttttcacttttgttgactataatataaatttttatctttttaatactaatttgttaacattttacacatttaagaataaaaataactatttatccttatatatatatatatatatgattcactataagttgttaaattttaaatgagctttaacaattggttaaatgacacactcgaagtatgcaagaacaaaaaaaagtctcaatgcaagaaaaaattccagattttttttaaaatttttgttaaattttaaatgagctctaacaattggttaaatgacacactcgaattatgcaaaaataaaaaaaagtctcaatgcaagaaaaaaattccggattttttttaaaatttttgtttaccttttcatttagcactctttctttcctactttctgctgagcacattcctacctataacctattcacattttaattttcaaattctcctacctcacttttttggctttttggtataactacaactctaccaaataccaccaactgcacnnnnnnnnnnatatgagaaaaatgcattttataatataaaaatatgtttaaattaaatatatcaattattatagatagctctttatggatatatttatggtattagtaagttcctgaattattcgacaatttttaattaggctcatgaattatttttcttttcaattaagtaattaaaattatatttatttttaattaaatcattttatctaactattgttaccaaaaattaatcacaagaatttaagtaatccctatatccaatattgtcacttttgcaagtcaaaagaagataggaacgaggtggcattggagtgaaagtattctcaatttacaaagttggatctataatttatttttttggaagtatatcaacataatagattagttatgacaaaaaaacaagttagaaaatgacttcctaagttagttgaaacaaatctaatctagaaagtagaatttaaaaaaagcatccactttctatatgactaggggtgttcacgggtacgagtcatccgtgaacccgaatcaatccgaaccgatctgaatagtttgggttgggtcatttatatatttgggtcaaaaccaaaccgaaccgatcaaaaccgttcannnnnnnnnngtttaagattgcattcaaaaataagataggatattttttatattgcattaaaaaataggataaaatatttttaagattgcattgcataatataataaaatatctttaagattgtattggataatatgatagaatatatttaggattgcattcaaaaattggttaaaatcatatctttaaattagtataaatagaaatttggtgttcatgtatgcattccattctaaataatattagagtattagagagtttatgtttgcatcattgagagaattattgtgagatcatatagaagcgtttgacacgtttgattcttcaactctcaattaggatttaaaggtacctatttgcttaaggaatataagcgtaaatgtaactattttattgtattttttttcttgactttgaaaaaggtcacagctgagaactaggataccagttttgtctctgttcttgatgaattgagacatgcaacttctggttgggaaactaggataccagtctgattgagaaacaagaatatcagtctatctctatttttggtgaatttagactacatcaaaagataccaattggaataattgttgtgtaagagtagactattatagtaaatattgttcacaaatcttttattttaatttatattataagtctattttataatattatgttgatggtattaaatgaatcaattttactattttcatacatttgataatattgtgttaatggtataagatatttaaaagaatcgtgataaaatagtagttctaaaaaaaattaaatgggtaatccggtgatccgaaccgaactgttcatgaacgggttgggttgagttggattgggtttcaatttttttttcttctgaaaaccgaaccgaaccgacccacgaacacccctatatatcactatatcaatgctaagaaattgaagtagtaaacattttctagattgtttcttcatggtagattttttataaaatagaaacttgtttccgttatatatttgagtttgtcacgcaataaaataagttcccgttatgtatttgaatttattacaaatagaaacttatttggttatgtatttaggtttattacacaacgaaaagttctttttatttttattgtgtattattgccttcataatcaagaaatgcaatatttttttatcctaattaaaaaattatggattttcctattttatcctttgtcatttctacttcacaatatacattaattaaaaattagccaaaaaattaaaaatataattaataaaaagtaattaatattatcttgaactaaaaatatagataaatataaacaaatatttcaaaaatatgacagttgaaaagaaaaggaggtagtgtcatttcccaccctctttcacagtgaaaacgtttttttgtcatgtttcaaaaccaaatacacaatgaaattttcgttccattgtatatttcacccatatattcaacaaaaaaacatgtttttattatctgaatctaataaacaaaaatacgtttcattcggagacatttttgttaaaaaaaatacaactaaaatactctagtactttatgtttttattatatttagtttaactttttatcttttggaaattttaatttatttcttaatatttttaaagtgagtcaaaatgaacattctaaaacaaatgatttttttgttttgttatgaaacatgattttaaatcttttttttactaatttaagatgtgaaacttgttatcttaaatttatttacatgaaaattatgaaatttaactgatactcaaaccaaaaaagtcataaataccataaaaatttcataaaaaatgactctcacaagcaattaaaaagaatatgatactagatattttaattttttgtttgcttgtaagattagttttcacacaaatttcaccatggttatgaccctttatggttcaaatcatgttctacatttttcatatacatgaatttaatggaacatgtttcatgtctcaaatctaataaaaaatggatttaaactcgtgtcccaaaataaataaataaataaatgatcactatttcaaaggaacaattttgatctattttaaaaactaaattaaactttttaaaaaataaaaagacaataaaacataaatgacaaaaagtgtattttagtaaaatattatcagcaaattgggaggtttaaatcataaattggagaataccaatatcaaatcctcaaaagaagagatcggagacaaaatttaagcccaaacgtaacaactatcacgtattcgtttttgagctattttatttccgtaaatgcaattgagaggtacaggatgcaaaagtgggagtgcggaaaataaatacctcgtttttgtgatatcttaggacaggcccatgtcacattacactacacagaaggtccattctacaaccctccaaaaaccctaatacatatataagctccctccttcccccaacctcacttccctcaccgcacaaaattagggttttccaattcccagagcaacacaacacaacacaacgaaccaacaatggcgcagcctcagccgcagtcgcagccgcagcacgggcaagcagcgctggagcaggtgcagtgcttcggtcgcaagaaaaccgccgtggccgtgacctactgcaagcgcgggcgtggtctcatcaagatcaacggctgccccatcgagctcgtggagccggagatcctccgcttcaaggccttcgagcctatcctcctgttgggaaagagccgcttcgccggcgtcgacatgcgcatccgcgtcaagggcggcggccacacctcccagatctacgccatccgccagagcatcgccaaggcgctcgtcgcgttctaccagaagtatgtcgacgaacagagtaagaaggagatcaaggacattctcgtgaggtatgatcgcaccttgctcgttgcggatcccaggcgctgcgagcccaagaagttcggtgggcgtggcgcacgtgcgaggttccagaaatcttaccgttgaagaagaatggtggtggtgtttttggcttttggtttcggttcatgttttatgctgtggaaaaaaatgaaaacttttgttgctggtgctttttggtagctttataattttggtcgcttttttataattgttggatttgatgttgttttgattcaactttttttgtttaggtacaatgaaggtatggagttattattattataaattctagtttgaaatgttagggctttttgcttgtgcatgctggaattgctctgggaatgttggaattaagcgcgatttagtgcttgtggaattgggaattcttataagtgttagaccgaactaacacactttatatattggatgtgccaaggcattctaggggcgtagggctatggattataattttgatttatgtaataagttttgcatcacctgttcttttgttttggcactggcttggcaatttggatcttttagtaggttgaatttaaaagagtgcttatttgactcagattaatattagttttggttggggttttataggtttttctgtgatcattgtcttctaaaggttgaaggtgattatcgaattagttagatgatgccaactccattaatcacacaaatggatggatggtttattggtcttttatctcaggcttaatgaaacagggtgcttgagtagatgtagcttttaaaatttttatcaaacagttatactatagtagagtattatgttatgttgatgttcacatgagatttctgacaattcaaccatttgtttataagtaattcaatagtaaaaatttgtgtatattttaaatttaatgttatactttaaaataaagtagtgtaataaggtattaattaatttcaaaataatgagaaaaccatattttaatataatttggattatgaattcagtttattcataattatattaaggaatggacggagtaattgtgcttaaggttataaattagtcttgtaagagcattggaggaaactgcgtaacataaaaagattgttttggtgtgttaatgtgattctgagtctcctgaaattggagttgcttatgagttaacctaacttaatattaagagaaatataatatttatgcgttaatcaacttgttaactagaaaatccagtgaaatttttttttttgagttttttaagattttaatgtgacataaattaggttgtctatatcagtatcgttggagatgggctaactaggtgctagtggttgtaacataacattggagatgccctaactaggtgctaatggttataaacataacttccgcaacttgctctggccacatacatagtcttaaatttttttcttcttccaaagtgatagaatggaaaaatattctcactactcatttacccactggaggtcctttttacttagcaggcgtgactaaagaattcaaatttgaaaggaactatcaaaacgtatccaaccctaagcatattttttttggtgaatcaaccctaagcatctggcatcatgcttctatgaaagttgaagttcttgtaacctccagacatacctggcaagcatattttgtcaattttatgggtgcaattataaggtagacatttttagataaaaaaactcaaaatgacatttttagataaattagacttgaagttctacaagtttttcattcttttactaaattataattcattatttttttattaactatattatttcagaatgagtaaagccttgaatgaatttgagaaaataatcgagaataaataaatcactatgttattatttgagatgttaaaggctttttcattttctcatgagcatatttggataagtttatttaaaatcacttataagagaagaaaataagaaaaaaataaaatgaacattttcataagttaaaattaattcttctttagctaataattaactaatttagagaaactctcatataaattctttaaaattaactctagttaaccaatgtctaatcattatgtaatgatttgttcgtttgtcatatcatatgtttgattgtgggttttttcctcatttttttaattataagctgtgttttaaaaagttataatagctatttcagtgttttttgaaaaataaaaacaatagcttcttaaaacaaatgcaaacaacaaccgtaacataaatcagcacagcttaatctcaaatgccaatgaagcaatgaacttatctacaccagctatatttacagcaccaaacctctctttcactgtgtctcaactccaacctcaattatctccaataaaagataaaaacatgttacaccagaatctaatctaataaaagacaaaagcatgttacaccagaagcatgtcttcgcattctctgcaagatcattcttattcatgctttggctaacaacttagttcccttaccccttcctttcttttgtctcgacagcagcttcctcagaaaaccaaagcctacttgcttcttacctggcacaattgccaaagagcctgtggttttgcttctatcatgttgctctgaagtgagacttttgggacttggcagaggtttttcagtttcagattgaagaatgggtggcctctgcacatctttatcgcttttagtttcttcagtttggacagacttatgcatccctcctttagcttcatcatcgacttgcatttgattgcgtagagaggatcgtttgatcaagttcttcttctgagttggattggctatcgtattagttgtggagacaaccttgtcaaaaattgctacttcattagatgaagcaagtgccttgagttgtttcccaaggtttaggatggtttcttggcactctgccaactttgatgaagctgttgtgatctcccagccctgaacattatatataattttttgtttagttaagattcattaatgtttaaatcaaaagaaaatagaagtacaattgattaatggtaatgcacacacacacgcgcgcgcgcacacacacgtgtgtgtgtgtgtgggtgtatatatatatatatatatatataaccttgcaacatacagaagaattaccaaagtcaacaataatagttttaagatgtgttataaacatatatttcgaattaaataggatgttgaactacttacagtttgatatatcttttctacttcgtatttaccatatgttggagattccttctttgcaatgctgtaaagattttttttcatgttctcgaaatcagattcattgcgcatggcaacagaaaattgcagtaagaatagaaagtagaaaccataaaaggaagggaatacaaatcattacctttccagctggagttgaagttctagacatgttgcttctaaatcttcacaggagttttttttatcctctaattcaacttctaaggacgaaaacttttgaaagatgtcatttaatttggcctgagctattgtaagctgtgtatcaagatcttcatttataatcttctgtttctcaatctgatcttctagtgttgctttggattctttcagtgcctctatttctgattctaaacctttgatgttttttttggcttcttgacattgttttgtcaagttctgactctcaccagttactgacagcagcttttcttccaagtctttcttcgcagtttttgtgctcctcaaatcatattttagttttctaatctcttcaaggagatcacattgatcattctgtgtgtcaaagagctcacactgttcgtcaggatatgcaaatgagggcgagcgagaagactgtttatcttcaacatctgttttattttgattttgtgataaatgactgctgaaatgcttcttgatcttatcccttgcaatggcagcatttgtggaggtggcacagttattaatgctccagtccaaagcaaatgccacttcctcaataaaattttcaaaatcagctccccctgttaacagatctttgcaggtgtgaacaagttggtgcaggagaggatttaagtctgaaaccttccattggaaaacatgaacaagatagtctttggatgttggtgattgcgatatgtccgaatgcttaatcccctccaaacaatctggacaattgttgcacataaatgactttggagcaattccttcaatgaggttgacaattctgtggactgactttctcaaattagaattgaagtgttgcttgctttctgcttcgatatcagatttacaagcagttggatgatttacgcaatccaaagcaatttttatgtcatcaaacagttcatgaagacttcgtttcgatatgcgtttctcctccgagattgcattcaaaacaatctgaagccagtcaaatgacttttcgtttgttgtatgtttgaattggatctcctgtttcctctcactaatgccaagatgatcttgttcaaccggcactagctccctagaacttacatcagagaagtatccccttttaggcgtatcaatagaaactatagctcgtttttccatctcgacaaaatcatccatgaaactaatgtctgaaacttcagtgactctgctgcctttatgaagtttagcctctgaagttcttaaatgttcgagttctgacataagagcattagcccaggatccagaagagatagcctcatcatcactattaatgtcataatttgacatcaaaggaagttcatttgatgtgggacaacacctagccagctccatggacttttgattttcagaaatctttctaagcagaatctcagcctgtgataatctggaagctgtttcaccgtacataagtcttgaacattctagttcagagttttttgtggttaaaattcttttgagagccttgttctcctcatccagatcttgcaagcgtttgatcattagaccgaaacttttctcggacacattgctagagtttccgacatcattgtttttgtagatcaattccctggaaggatttgactttcttattctcgccattccaacttcattcttcatattccccaaaccagcagaacctggtgatcttttctgcagcaaaagacgtagtctctgacactcggcctctaactttgaggctttatgagaactctcaaggtactgtttatgtgagacatctgcatactgacggctatagtccatctcctccttccggatctcaagttccttctccagcacgtgaaactcgtatcttaggaaagaattttccttttctgtggtgtctaatctagccatcaatgtagtaaacttggcatctgcttcttgtttacatttaaccaggtccccaattgacttctctttggttagcaatgcattagcaagatgtgtattctcagaagttaagtcatctagccttttacttgtttccctcaacttctctttcaaatctctcagaatcttttcatgctctattgatatctttgcagtggcacccctcaacttttgctcttgttcgtcttgaacactgcttggtggctgcaaaggttcctccaatgttgcatctgcaggagtaacagtctcagcagattcttcttcttctaagtcttcaatagattctacttcctgttttgtcttgtcattgcctagatttttatcagaaatttagtaagatcaaaaccgaattgtatgtttgagcagaaaacatgtattgaaagagaaaataggagtgatagcaacacactctctactgcactccttctaacgcactctgtaatattggctaaaatttattaggatctacaaatcatgagtgaaacttattaaataaaaagtgagaccttcaaaattttgtgatttccagtgaatatcaacaaatagtaaggagtgtgtttaaaaagcatgtgttagagagttgttactagcatttttcagaaaggaatcatcaaagaagcaccataatagtgggaaaagttgaaaggaaatgtaacagtaagttacctctaatttcctgttggggcttttggccttctaaagggtcatttccagaatgagaatcaaggaggactgttgccaacttctcatttagactttttgatgatctttccaatccagtttctttatttgttgaaagtttatgcgcctgaaaaaaaatatagtattgtcagtattataatcagatcgagcatttcttctatgaattcagctctctagtatttactagatttttatatatcaaaattttgcaaaacaagaggatagataaccaaatgaggaaacaaacagcaacataaaaatgattaaggtaaagtttttgagtacctcttcttcaatggttttagaaggactgacaactttgtcaactgcaaggattgttttctccatagattttttcctccaaagccatggcttgtggttcatgatttcaggtactattcaagaaccaagagagaaatttagaaaacgtgctgctattgcacgataacaataagaagaatttttccccctacattatttctctatttggtcctaaagaatttcagtgcaacataaaaaaaacaaaagactaaacctaattaatatttaaagaaatatggattcggtaacataatgacgcattttagggtccattccacccatttataatttgaaggtaagccaccccactattaatagttttactgaagcattttgctagctcatcctttatggaaactagctttttggttaaaattcaaacttagctaacaatgctgaactatcaaacatggataagaaaaatcatgaaaatgtaaatactgcaacacaaacatggaacaaaaaaatccacaaacatggaaaaacactacactaagactatctttctatatcccctgcatccttcactatcagatactcaatgaaccatcgagaaccactgaaaattatcaagatagtgacaacaaatgaaatggaagtaaagaaaaaagctagaaaaacaagtacactaataagaggagttgcgagtgaaaattgcaacaacagctcatacctgacagaatgtagctcaaacaagacttaaaaaagcattggaaggttactactggccttgaaacttcaactagccaccaatggaacttgaaggtgaaagtaaaataataggcacataataagttgtcaagaaaaattcccaacgggtatatgtcataggatgctcaccctctccaccgacagctacgaatccttgtctgaaggtgtatatattattagttagttttatcctattaaaaagtttcacgtatgatatgatgttaccaaaaggttaaaaatgaaaaataaaggaagacccacattcacgttcacttattttttggatatagaccaactgtattatctagacaatcatactcgaatccaataaaattattatgaatgataaaaattttctttaaaatattttatataactctaactgtataatcaagagttaaatttgacatctttaattaaacttaaataattttacgtcagttaatctatctgttaggtgatataatcacattcacttaatgtatgatggagtgtatgatggagtgaaagagaagtaactgtaacgaaaagaagtcataaaattgaccataagtggtagaggagggtcataaaagacacggcattagtataggtgaggagaaaagactaaaaagagaacactcccgcaacacattgaatgttgtagctatctgtgaaatgttgtcgaggttcggatgaaataatgaaactaatatatagctagatgcctagatatcacatgtccaagatattcttgtaccataccacaaataaccaatttatttatatttatctgtgtacacgacaataattgcaaattgtacagtgtaacttttcgttttctgcacaattttactttttagatgatacttcaaaaatttacattaacaatgaatgacacaccacgcacacaaaaaatatcatacggtaacaatagtaagcaaatgtttaggctttaggattgtcaacgtcaatataaatgttaagcaaatatacatcaaatatgttattagtgtatatatttttaatctaaactaacgacatatttgatgtatgatactaattataagtatatatgttatatgaactatctattttagattagtaatataatttttttgtgtgtagatctttctttatcattatgacatgtaataaatgatgtaaaagagatagataaacacaaaaaaaaatattattgtttatactgaagtataataatacacccactaatgcattatagagtgtaagaaaaaaactatatattctattgttaggagatttcacattatgcacagaagcagtcttacctttccataatccattataaagtgtattgaaaaatatattagaatgcgttatcatacttcattaaatttatacaaggaacagttgtgcatataattgaaatttcaaagagtcaaatgaaaagtgtcacaatggagaatactatggaaacagcctccaagaaatgcggggtcagaagaattgtgaatttataatagcatcatattataccctctataaatgatgatgtctggtgtgtttgtctttggttggttgctacaggatacagagtgtcaaaattagtttagttggggaaggaaagctttaatagcaaacaggatgaatatctatatttatattttaaattatgtttttatttaattttgttttaaaatgaaagaaataaaatattagattatgataaaaatgttataatttttttgttcattatataaatactacagttttttaatccaaaaaatccttttttccctcaaacaatccatcttcccagactcaagggtttcctttcttattgtttgaacaaaagaaaaccccgttttgtcataaattaacttacctgcacatgttaaaatatccacagctgacacatgcttcagaataccatgtctatgacttccatgagaatactttctaaaattaaatcgaaacagcctatcaaaatcaaacctttaatcatgaaagatctaagagaataatattgatgatttttatgaaagcttttttcttttcctttagtttatgagtgaggcccatggacaacggtggcacattcacttgcttcaacaataaggagaaataaaaaataagaaaaaggggaagaacaagccattattcccaatcagatgttatttgagttgacaatggaagcaaccatttcttgtttctcagttgtgaatctataaacttatggtagaattgttaattaaacgctttgaattattgttttactggtcattaagtcatacttaaacattttaccgttgattttttttttccaacgtcaagttactttggaagattggcccacattaccttccaataaatcagctttaataaaagtgaagaccataagcaatgatacttttgactttgaaaatcatgaaatgcatactttatcacaaaaagggtttttgtctatcattttctttataccaaggggaaaattaaaggaaattatggtatataggaaatgggtgtttcccaaacgttaccacctgtggtggagcagcatggtttgatggtctagatgctgatgcattctcatagatgcgcaagacattcagaaatgtagctgcgaatgagattaaaaggtagttcaccaacgtagctatatgatgtattagactattaggtataagcttggctaaaatggacacaatagaacaaaaatgattttttaatcagtttttttttttcattttaatcaattttgcttgaggatataaaattagttgatataaaaatttgatatacttttcataagagttggatattaagaaagtgaactttctgaaactacaacatatataaaaagtttattaaaaaaacatcactccaactacaattttcatttctttcttgatatacaatacaatctaatacaaaaacttaaaatatataactaataattttactataacatataatacatatgagaaaaatgcaatataatgcattaccattaattaataactaaaaataactagaatctattacaagtagctttgattccctttttttccacattattgtgatcataaaccttctactcagattatattcatttatttatgtcaaatatatgttatgaaccttagcgtaggatcaatgctacggtgatggtgtttgggttgtggttgtttcagttgtttgggttgatggtgagattgagacgaatctggtcagatctaagtattataggttagtggtggtgaagcatgttgatgttggtggtatgattgtggtcacggtggaatggcaggcacacggtggcatgatggtgttggtggagacacaacaacatcaaggacataaagatgtcgcatgagtagatctattggtgttgggtgctatttgggtcgctacaaaagtgagagagagacaactttgggttcgctagcccgatcatgattttcttacccctagagggaaaaatccatactagcaatgcaataacgttgttggtatggtggtgatagtggcgtgacgctaggatggtgatggcggcacatgacgcaacgatggcctaggtgattggtaagaacactgacgtgatgaaaggtggtgatctagtgtttgatgatggttatggtgatactattgttggttgtgttgtgtgtccaacaaaatctactatttgttgtcaatctttctcaatagaagcatacttcttttactaagtatggtaaaaaaaattaaacaaaggaaatatcatttagttgaacaacgtgttttcattgtttatttttttcaacactttagtaaacaatggaaacataattatgttatacaatatgcaataaaattatatttttatagttttttttcactccttacataatagaccacccacaagggaaccatattttggatttggtcccaaagtttgtgtggctggttcatcaaggcccaaatatggttcctataaaagatgggttattgctattgacattattataattgctaatggatagatgccttttaattatattccaaaattatcccttgaatgaaaatacaacgaaaatgtatttttattaagtaaataaaatgaaaaaacaatataatgaaaacacagttttattgtaaaaatgtataacaaaatcgtattttcataattatttggagtaaaaaataaaacaacaaaaatataatttcattacatagtgcaagctagggttgctagtgccaataataagggttgacagtgaaaataatagttcccaagaacttatgtacccaaaaagatatttaagtctaatttaaatttaaaaagacaaaaccattaaagtaaagccataaatattatcaatttgcaagtgctcgaacttcgaaccaatttctgtacctgacgcgtgaacttatgtacgtagcttgtgcgtaaatggctaaatacaccgccgattatgtacgatactattacaggagcagtttatgatgccgtagcttgtgccctgagccgatttagttttcgaatctgaatttattttttgaatgtaattatgttacaagtaaaatatatcagaaattaaaatcatactttttaaaatatttttattttttatcaaatagacaattttttattggtattcatttaaaaatatatataattagttatgatttattcaacattcatctttatcctaagaaaaatcaacttaaagtcaaaacataattttaatgacattaattaacaaaatttaatttaataggatatatgggtttttagtttttccacgtagaacatggccataatcagcgacgcacaaatgacacggtgccacgtgaccccaaaacccacatgaccatatacgtcaccgaacaccaacacatttgcgtatatatatatatataccaccgaacgagggcattctcgggaaaaccctaaatccccacgccaaaatttccgacaactctcttcaattttctctcatctcttcgcacttttttgatttctctctccctttattcgccccccatcgactcgctccctgacccgccctgacccggcctgactcaccatcgacttgctccccggccggttcggtccaaaccgccatggagttcgctcacgagccaccgccttccctcgacggaagccccttcgccgcctccgagactctcgcgaattctccgtcgtcctcgtcgtcttccccttcctcctcatcctcctcctccacctcatcgccgcgaggcgcgaagggaaaagagatcgaatccaccgcgtcggagactgcgacatctccggcgccggcgaagtatgacgacgaggatgaggatgaagaggacgtgtgccgaatttgccggaaccctggcgaagccgagaatccgcttcggtatccgtgcgcatgcagcggtagcatcaaattcgtgcatcaggattgtctccttcagtggcttaatcacagcaacgcgcgccaatgcgaggttatgccttctctttttttcccccctatcttttcgacggtgttcgacgtaaattaacgtgtttttgagtttttgttggatttctgatctaaatcttgtgtagatggaggtgataatatatcttttaccataccgtgtgataggataagttgtctagtgatgaaaataaaaaagtttcagaaatttcctaattttgttgcggagaatgatggaaagtgaaaagaaaagtaggtgctatcaaatggttgcgttccctcttcgtgttaaattattgaacggctaaggatggaaatttgttatgcccatatatatgtgtaatctttctatttgaaaactaaagagtgagttgctgaggcacagcaattttctgaagcagctcaatattgttaggaagataaacaatttcctttttctttttttatcagcaaatgttagttgttagttgttagacttttgttagtgggggatttgaacccatttctcccttcacaaccaagccaaccctataactactaaaacaattttgaacttgctagcataaacaaagagaaggaaaaaaaacactcattggccttgcagagctaattgaaaacacgtgtattagacttaagcatacagtaggtttgttttaaaagttatgcatatgctatgcgatgttcaatagcaggtttttctttgcacctacaccaaatatgtcaaaagttagataacccctccccaatgtactgctgcctcgtttttatgtacttgatgtttttcttcttttttgttggggtcttttttttttctctttctaaatgtgcttcttgtgtgctgcaggtctgcaagcatccgttctccttctctccagtttatgctgagaatgccccagctaggttaccttttcaagagtttgtggttggaatggcaatgaaagcttgccatgttcttcaattctttttgcgcctgagttttgtgctatctgtgtggctcttaataatacctttcataacattctggatatggcgattagcttttgtgaggagtttaggtgaagcccagaggttattcttaagccatttatcgacagcagttattctgactgattgcctccatggtttcctactttctgcaagcattgtcttcattttccttggggccacttctttgagagattactttaggcatttgcgagaaattgggggacaggatgccgatagagaagatgaagtggacagaaatggtgctcgaattgctagaaggcctcctggacaagctaatcgtaacatcaacaatggtgatgggaatggtgaagatgctggtggagcgcaaggaattgcaggggcaggtcaagtaattagaagaaatgctgaaaatgttgctgcacggtgggagatgcaagcagctcgtcttgaggcacatgttgagcagatgtttgatggtctggatgatgctgatggagcagaagatgttccctttgatgaacttgttggcatgcagggtccagtttttcatttggttgaaaatgcatttacagtaagtctatcaacatgattttattgaaattgaacttgatgagggaagccttttcaaaagctaaaacagcatacgcacagctcatttttttaataacttctcatttaattaatttttaataaattactaaattccattacttgataagtgtgtaccaaaattaaattccattacatgataattgtttaccaaaagtattatttatgttgtgtatccttacttgatcttcttattctgcttctttggggtaatggatgagatttactcttgatagttaacttctgtcattccatgtggatggaaagatttcatataatgtaagttgattagaatttaatgtctattttagataaaattataagtattaagtacttgtgcttataaaacttcgatttgcatgaacctcaattgattgtgggatgagttttcctcattaaccagagtatgagtagttcacttattatgattatttttcctcattctattgatgcgactctttctttttagtataaattgtattatcttttactgaagcatgaatatttctctggttgatgaatttcccatgtttaggggtgattatattattgacaccacaaattcttatgttttgtaaattatgaccttttctgattttgttaaaaaaatctctgtttttttctttggagaaatgaatttgttatttatcacatttcgtttttagaactaaatgcttttttctctatgcaggtgctggcaagcaatatgattttccttggtgttgtaatctttgtgccattttcattgggccgtattatactccattatctatcctggttcttctcaactgctagtggccctgtgttgtcagctgtggccccacttgcagacacatctctttctttagcaaatattactttgaagaatgcattaacagctgttaaaaacatgtcatctgaaactcaagaaagtggatcaattggtcaggttgcagaaatgttgaaagcaaatgctagtgaaatgagtgaaatgtcaaacataacatctgcttcagctgttatcttgaaaggagtgtcaattggaacttcaaggatttctgatgttaccactctagctattggatatgtttgtatattgactttaattttctgctactttggaattgttgctttaattcgttacacaaagggtgagcctttgaccgtgggaaggttttatggcattgcttctatcgcagagacaattccatctcttttcaggcagtttttggcagcaatgaggcatttgatgaccatggttaaggttgctttccttttagtcattgaactgggggtatttcctttgatgtgtgggtggtggctcgatgtttgtaccattcagatgtttgggaagacaatggttcacagagttcagttcttctctgcatcccctttagcaagctcattggttcattgggttgttggaattgtgtatatgctacaaattagcatatttgtcagccttcttagaggggtaatttcttgtcacgtgatatgatttgtaaagctctggttatattgttatccactgtttcacgtggtttgtatgtttccaatggcaggttttacgtaatggagttttatactttcttcgggaccctgctgatccaaactacaatccattccgtgatctgatagatgatcctgtgcacaaacatgcttgcagggttctgttatctgttgcagtttatgggagtctgattgtgatgctggtattcttgcctgtcaaacttgccatgcggatggtaccttcgattttcccgcttgacatatcgtaagctttccccttgatcaattttagtagtttccataggttatgtgtcacattttttaattgtgaatatgcatgtttttgcagggtatctgatccattcactgaaattccagctgacatgcttctctttcagatttgtatcccatttgctattgagcattttaaattgaggacaactattaaatccctacttcgctattggtttactgctgttggttgggcacttggtttgactgatttcttactgcctagacctgatgagagtggtaatcaagaaaatggaaatggggagccagctagacaggaaaggctacaagtagtacaggctggagtgcatgatcagggtttggtgccatttgcaggcaatgatttgaacagggccattaacacagtgggagaaatgaatgctggagaggattatgataatgatgagcagtctgactctgagtgagttccttgcaaattgaaatcctgcaactgacatttatgagttatcttatattgcactctatctatttatctagttatattacatttttgtgagtcgatgtgtggggagatgagggcatgacggaatcaagtctttcatttcatgatttttgggttaacacaatgcatgaaaaagttttctagagccatcaatttctttgcagatgcacattttggctattgttagttactctgtcaccatctaatagaatatttttctgactatagcagttatgcattcgtgcttcgcattgtgcttttactggtgattgcttggatgactctccttgtcttcaactcggctctgatagttgtaccaatttcccttggacgggcacttttcaattctattcctcgccttcccataactcatgggattaaatgcaacggtgtgtaattgattgaactagctttcaagtcactgggctttataattatttattaccttacttcttttcacagatctgtatgcatttatcattggaagctatgtgatctggactgctgttgctggagttagatactccattgagcaaataagaaaaaagagatcttctgttttgttcggccaaatatggaagtggtgtggcattcttgtgaagagttctgcacttctgtctatatgggtaagggtaattcctcttgctgatcatctcactgaagctgactctttgattttgcacagatcggtatttgctagtgattaatccatctttttttttgtcacagatatttgttatcccagtgctaattgggcttctctttgagcttttggtcattgtgccaatgagagttccagtggatgaaagtccagtattcctcctttatcaagactgggcattaggccttatatttctcaagatatggactagattggtgagtttgtttcctttattatcagcattttctgttagctttttcttttaattggcttaattttttaaaaaacttttataagcttatctaatatttaaaggtatgttaatagactatgagtgatatgatgtggcaaacctcctttttgcttttaaaaaaatctggtcttctgctatactttagttctagtaaatgtatcctgctgcattagtaacaataaaacaaatcccttgatagtatcaaatttctgaaatgtttcttttatattttttttccataccaatgacattgtgattcatgtagccgacctcacttaatgggataagacttgttatactgttgttcctttattttttgtttttttcatccatcttttttctaaagattaataaagttgtgttagtcgctgacaacctaacttaaacctccttttgtaatctgggcttgggagttgggactggtataaatgttagcttcaaataattaaatagctgtatataatcccaatgacatgttttatccatgtagcttaacaccgtttcggggtaaagcctggttgttgtaatctacaatttttttgccatatatggtattgttcttcatttttcgggtaggatttttnnnnnnnnnnnnnnnnnnnnnnnnnnnnnnnnnnnnnnnnnnnnnnnnnnnnnnnnnnnnngtcaatatatcgtcggatggtaagaatgaatataattggatagtaagggttttataagaggggaaacacttgttgagctaccacttggtgtcttggaattgaaatcagaggaaagatttttacctgcagatttagttgatgaactacaacttagtttctttaccatctacaagtttcagatgatcaatttccattcagttgacaaagaattatctaccttgaaaaaatgttgaaatctttgcatacccaactaataatttgacttgtctcttttttggcctccccctcctatatctatcaaatttattattgtccacgtcccatttgtaaatggttacctgtctccccaaggttggtttataaattgagattgttgacttggttcttttattaggttatgttggaccacatgatgcctctggtggatgaaagttggagagtcaaatttgagagagtgagagaggatggtttctccaggctgcaaggtctttgggtccttcgggagatcgtacttcctatcataatgaagctgttgacagcattatgtgtaccctacgttttggccaaaggtgtatttccagtgcttgggtatcccttggtgataaattctgccgtctatcggtttgcatggttgggatgcctctctttcagtttcgtgtgcttctgtgccaagagattccatgtctggttcacaaatctccataattcgatacgcgatgaccgatatctgattggccggaggttgcataactttggagaacatgccgagaaaaatgtagcagatactaatacaggggagaaggacgctattttactaggtacaggcataaaccaacaagatcgcgaagcagatgtcggactacggttaaggcacgtaaatcaacaggtgggctgaattgtattttcagctaggaaggccacgttgtaggttgtgaagcctcgtgctgacatggtttatgaatcactgatatatattctatctacacttgtgttgcgttagttataacaccttgtcatgacacacctgtaatgtagttaacgttaacattttgtgcgtgttacttgtttaaaatttagctaatagtaggaaaataaaattgttgatagcgcaaagttatttttttcaaagaaattctttgtgaaatagggaagcggaaggcatgctatggtcttgatcgtctgtttgagatatacttaaataacatagttatagtagttaattgttatggtaattatttattaattcgtaatgtgattgattcagtgggcttaacttcaaatgcatcaatttcatacggttaagtagtctttggaatgtaatttcttgcactatgaacgagtatgttgatgaatattgaccgagccaatacaatgttccccagtaaactcttgaatgcaatattttgatcagttcaactgggtaaaagatttccttgtgcattgcaacgcaacctaatatatagcattggattcaaaatctgtcaatattataaaatcattaaaaataagcacttcaaagttatatagcattgaattcgaaacatttaaaatttataaaatgaagctcaaattttatgttgctgataattaaaggggggaaaaaataacggactagctcccagtcaaacgggattagtgggtttagtttgtttaaagagttagattcataatacatttattttaaataaatcaacagttttaaaattcaattaccttacctaatttttgaaaattgtcaggaattatgaggatagtttattggtgctttctcctgtaatctaggatcatgctccaccatgcatgcagaattgttagcaacttattcgtggacaacaactagtgggaaagtctatcagctgtttccactttcagagagaaatcaaatctgtagcggataactacgccaagtttggcttaaaaacgtcatacttccagtccaatatgctcactgcctttgcatttttagcttattcttcttacacttgttaaggaattactctattttagggcatcttgctccttataatcacccaaaaaaatcaactacctaatgttagcggatatacaggctacctaatttaagtaaatctagaagtttaacctgttttgcagatctcactaaaattactaaaagcaaaaaagaagcagtatttataaattgaaaatttcctttgggatcttctatttttaaaaacgtgaaaacttttaataattgagattatatacttataatgtatcctacttaaaatgtaatttcgtttcattggttttatgtaggcacatgactatttagtaaatatcagcataccactctctaattactattatgtggaactttccaaaagttcaaagtattccatgtattactggtttttagcctgaaaaaacgcttgttggtacaaatagaaaattcatacccgtcttttaatcgggcgataatagatggataaccgttataaattttcttaaataacacatcctactaattagtattctattttctctctaaaagttgcaatattttttaaataaatcggtagtgttcacacgtgcaataacaaactatttagagaaaaaaaattatttgattttcttagaatgcaaatttcttttgaattaacaataaacaactactctaattgtatttatcccttacaatattttttgctaaagaatttcactaccctaaaattttttatccacaattttttcactctaacttgtttcatttcaccaattttatcattcaaagtttttgattttttgcatattttactatcacattgttaacaaaacaacttcatatattttttctttaactttgttttttgtgacagatcagcaatgataaaatgtgctaaaattaaaaattagatgttaaaattaataaaaaaaaagaaaattaagtgataaaatttttaattaaacctataaattaatgttttttgaaaatgatttaagtaatattttgagtcaagtcaacctgtcatagtcctagtgctctaaattctttatttttttaataattatgtatcagtcactaattactatccggtggtaccttctaaccgaaagtacctcataaattacttctttctaggctttaagaaaatgcttgtcggtacaaacaggaaattcatacacatcgtgtagtattttaattttgggttaattataaatttaatcacaacttttattattttataaattttagcatcaagttttatttttacaaattttacctaactgtcaatggtggctgaagctataccacacaccaactgccttgcctaaatttttgcttgcttgaaatattttggaaaacaaactaatttgaacatttatggcaaaaacattttacaaagctacacttctccatgcaacctgaaacagatgatgatagaaccctcgcggcatctctctgctcacaatgcgtgaaacgtcataactccccagcttctatacatagtaataaaactacgtttgctcgccagcttctcctcgcttcgcaggttcggcaggttcttctcggcttctcccagcttcggtaccactcctcagcttctcccagcttcggtccactatcaaacctcagcttcttcaaccgaacgtgaggcagaagcaaaaatccacaaaaggaagcgggaaaagcttgggacaaggaggccgaaacttcctcaccaactctgctaaaattcacttgctcacctgctaacttcctgcatttctcatttgttcacccactcctaacactttctctcttctctctgtatgatatttttgcttcctcacctccacgctccctcaaccacctccacgctctctccaaaaaaatctcattcgttcttgctgtttctcttctacacgtaattcttcttcttcacccttcttttcttatctgttttgggttcttgggtgtaccaaaaatgtaatctttttttatctccnnnnntatgataagcttcattttatttttttagagtaagtatttgacttagaaattaaggcagaaactctctttctatataacaatcacctgtaggatagaaataagatagatgatggtgtttggttggtgaaattgatatttggtatccggatagattgattattttcttgaaattaatccaataatgagtgctgaaaaatacagtaattatatatctaaactggtgattttgctgttctggtaatgagatattttaatttttttgtttgttcttcaatttgcttgatgcccaagagaaagttagcattcgcagccaacaaaggttggagtttatttaatatggggttttttgtgcatgtgtttgattattctgaaataccgttttattttcacatccaatattgtttatatttggttgattagtctgagttgaataaagggttgtttttgtgccttatgatcttgatcttggtcgtttgcatatatgtgaaagatagtagggtattgatgtgttctattgggtgtatcagttcttgcctgaatgagggcttatgagtatgttttaaacggtttgaggataagggaaatgtatcctgtttgggatatttttatttgatagggaaggaaaaggcgggattttcacttgaccctgcaacagatcagctataacttgatttgatttttatcaatttgaaggatttggaagagattgcttagtaattttcttattacttttaattctaaatactggagtagtaatagtgtttcaaagaaaacgtctctaattgagaatgagtcaggaaaatagcaagaataaaaggcatgaactagctgtattaatggacaaggaggtatggttatttacaatttttaaaccattttgtcaattgtgtgttgctgttagttgttgatatcacacaatttattttactatggatgtttatagtctgttattgaggagagaagaggagattatcctgggaagactgtacaggtatgtttaatcattctgatttttactctttgaagctatttttaattgtggttagtgccttgactttcattttttggttttttgctttatttgtaggttgtgcaataccagttgatgggaaagaagggccagctgatgtttgtgtcatttaattgggtggaactataggtaaataatactcagtaaacttttaatcaatactatgatagaacttggttttcagtactattataattctattatccattcagaattttccatatcttaattttaaaatcatgggttaggtagaagtagaaaactagaaattgaaagcgacttttatttggcaaagtgagagaaaatagtattgatattatcgttacggtgaaaactctagaacttctatattctgaaacaaccaccaccaagtctttttccacttggtgggatagtctatatttttaaaatccatttgaaatgacttttctttcatggttggtgagagaatgaagaaaaataattttgaaatgctattttattatttgtattttcccctcagtcattgatttttgctagcagtgctggaactcttgggttggagagtgataatcatatcgatatgatggataaaggaacttcatgtcaaacgtactgtggtgtgtctccactcttcttaattcttaatatttatgtgaagcctatgacattatctgttatataattgattcaatttgaaggctatatatgagttggtacttgagtcacccagctgtcattttctctccaacaaagcaactgactgagttgttgtctatcactgtatactgtaagtgctgtgttggtcttagtaaagatgataggaaaattggcttgtggaagatacaaatttatttatgacaattgttggtgcctatcatagaaaaagttgtagaatcttgccttaggtgaagtccggtgaaagcctgatttaggagaaaagattaaatggagagtagcctctatcgttataggtagagtaaaatttatagttgatatcattaacaaggattaaccttacctgttggggaaatgcttggttgttgttaatgatgccttatcaccatcaattattttatatgatttgtttagtacttcagttttagaaatgcttgcaaaatctcgtgggcaaaacagaaatgggtagaattaaaatgtttcttaacctttactgatagctttctggtttgatctgttttgttcttctgaatcctctcaatcccttgagaaaaacataaatggatagaattaaaatatttcttaacctttactattagattttgcctctagggatttcttgattgtgtcatttagatatattattttctcaaaggagtaggattggactgttttcaaattgttgccaaatgtagttgcagttaaaggtattggtattcagaaaatgctctgcttgactgcatagtaaaccttgcattgccaaaaagaatgcaaaatcaaaggaagctattaattgttgatgcatattagttttctaatattgtgttttcggcctgatgttagatataataccatatgaatttgatttgtatggcttcaacactcttgtctgcatgttaagctgtgattggtatcaatatcaatatatcatccatttaaaaagtaggggcttcctcttcatttgttttcataaaaacgtagagaaatacatagaaacacatgccaaattactttctattaaatccaatgaaattgatatttatacttgcatgcaggaatcatcgaggtttgagacactactggggtcttcgtgtacgtggccagcatagcaagactactgatcaagacatatagccaactgaaggtaaattatttcggttttatttctctaattatttgtttagaacatgagctttctaatggagtttcactaacaactatgttgacggacttgaagctttgtttgtttgaatatccttttttttattgttttgttctttagtttagaaggattacttgtcctctttctctttgtgattttttcacttcaacttattatatttcttcatcattatcctgaggctattaagcattatacagaagctataaaaaggaacccaaaagatgctaaggtaataatacccattgaatagcagtgataatccttgtgtttaatagcgaatgcaaatcttgatctgtttagatatcccttttctttcaggctaacagtaatagagctacatgctatacaaaattgggggcaatgcctgaaggtttaaaagatgcagagaaatgcattgagcttgatccaaccttttcaaagggttatactaggaaaggtgcagtgcaatttttcatgaaagaatatgaaaaagcttttgaaacatacaaggagggtttgaaacatgaccctaacaatcaggaattgcttgatggcataagaaggtattgtattgtgctacattcctgttatttgtgggttgaatattgccattttccatatgcaccattataagtacctaatcaccatagtatcctacattttcagatgtgttgaacaaaataataaggctagccttggagattttactcctgaggagttaaaggagagacaagtgagttgtgtaatgtgtactgataatctttgaactctattcaataaatcaccttgaatggaaatttcatgtctgcatatatttaattttatgtttttgcaggccaaggcaatgcaagacccagagataaagcattctgcaacaccctgttatgagacaagtatacttgtcgatttaatgttgctatgtgttgtgtcaatgtaatagaggaactacctgtgctaaagagttgggcatgtatgcaggtattgactgatttccaggaaaatcaaagagctggagaggaacatgtgaagaatccaatggtgatgaacaagattcaaaagctgatcagtgccgggattgtccagatgagatgaatgtgatggaaggtggccatcaagcagagaacaaatacaactatcttcaactaggttgattaagcatatcaagattgagtgatgaacacaaacattattaattaaattacaaagacacgaaatgaacgccttttgctgtcacaactttgctattagaaatgcattcagattcatttgttgcttggtgcacgtgttgttaacgttcaagcatgatatttacttcttttttttattttatgagaataggaaaaaataaagaataaattatttacattaaaggtgtagtatttttttggtgtgaactagggtagggtatttttaggcaaaaagttaaggactaatttttcgaagtattaaaatccatttaaacgattgaacattgaaaggtgtaatatttacattgaaaaaatattcaacatagttatatatcaaataattaataatatttatttttatcaaacattttttttttaaatctcatcatataatactagataaataatagtaaaataaagtggtaacattttaaaatttaaaagagatttataattttattatttatatttaagcaacattttggaattttgaattttttacgttaaattaactcttacgataaccatggcttcctgggacagtggtacacatggattcttagttctctgttagatgcctagatcaatatctagctcagaacacatgttcatgttttcccatacatcaacactgtctattacatcattattcaattttcatatcgaataaccattataaaaattaatgattagtatctgtacattacactaagtacacatatacttttttaattataatttttttagaaatagaaattattaaaaatgtaattaatatgtgcgtgtttgtttttatacaaaagtttagatgagataaatttcaatttatcaaaataaggtagatttcaaattttttaaaaaaatgtttagagtaatacatattacccatcaatggctgaaatgcgttgtccacttgaatcattaatcgccacgtaccaactatgccaactctatgtactatgtataggccacaaattaatgaatgcctctctctctcccccgaagaaacatagcgaggtgatggtaatgtgaaaagaggagcaaaatctccgagacatgtccaagtcatcgtccggcgctcggttttactcggtgaaacctgatgaccactgggaagaagaacccgttgaacccggtcaaccgggaagaagaatgaataagccgcaaccacttggaagaagccatgcactagctcggttttacacggtttctgataccgggaggtacaaatgaataagccacggccacggtgaagaacagcggaccccgatcaactgggaagaagaaatgaataagccccagccactaggaagaatccatgaacctagctcggttttacctggtgaaacccgacgaccaccaggaagaagaacccgcggaacccggtcaaccgggaagaataatgaataagtcgcaaccacttggaagaaaccatgcactagctcggttttacctagtttctgagactgggaagaacaaataagccacaaccaatgcgaagaagaaccgcggaacccggtcagtcgggaagaaaaaatgaaaaagccgcaaccactaggaagaagccatgcacctagctagattttatccggtgaaacctcgccgatgttttgagaccgggaagaacaaatgaataagccacgaccactaggaagaagccatgcacctagctcggttttctgtttttggagtccagtcagccggggagaagaagaggcacaaccgggaattgagaatatgctcatttcagttgtgaatcatacatgacacatttcctctttttggtaatatattatattcttttcattctaattttacagcaagtgttcattatcaatgacatattttcctgactcattctcaattagagtcgttttctttgaaacactattactgctccagtatttagaattaaaagtaataagggaaaaatgctagcgaaactataaaaagaagttggcagaagcgaggatacctggcatgaagaaaatcccgaagaattaggtagtagaagatgatgaacaacaaagggaagaacacaaaaaagcagaagaaaactcgtagagggagatgagtgcagagtttttgtgatgggcaatggttgaaagaaatgacccttgaaaggaaattcaaaatataagggggaaagtgtaactgccaatagcacgaaatgacacagaggtacacttggcacaaatgaaatgtcaagaaggacaaaaaggtaaaatgtaaaatgtattcaagagttggggcaaaacaggaagggagattttaatgcacgaagtcactaaactactgttacggatgtgataaatgggcttaaccataaggcctattaaggagtagtgggcgcttaactccaacttttaatatgatcatggaccatgtctatttcaaagatcgtggtaacaaacagttaagatcctgaccatgattctcgggaggaaatccacgattgattaagaggtaaatgttgtataaataggaggtgatgacagaggaaaaggtatacaattcttactctctctattttctctacacagtgcacacaccccacgtcaattgtggtgttattgttctaagcactctgatcttcttctctgaggtatttcatctccataaatattctcagagggagagaggaaaatttttgatccaacagcaaatcaccagcacacttgttggacattactgttcgtcacaaatggaacagtacctttccttgcttggctgtgatttgtttgcaggtttgcaatgcttttactgatatggaaaacccttccccttgtaagcgtttacctgatggctccaaaagggttcgggttcctcatttagttaataccgaggtcagctaaaagaaataacatattatgttttagaataatttggtgtgattttgttctacttaggaaacaaaaagttgaaaccatgttagtaggagctacaaagctatctccataccacgcatgcagtttgtgaagatgtatcactatatctagctgtcaagattacagataaaacatatttttgataagttagttggtggccaacaactaacagtttttcaatttctgtttttagcttttattcttgatagctaatgctcctttcattgctatatatatagaggtgtagcagtagcaatgtaattacgtagaagtgagtgaaggagtgtgtgtaggacacaaaacgcagagaggaagattggagtgtatgagagatagagtgagccttggtgatcttgaatgccgttagctaaatagtgaaagaatcaagcaagattctattgtacatagagatctttgtaactcttactccataatagataagtttgcttcttttcccgtggatgtaggtccctgtgactgaactacgtaattggcttgtgttcatcttctacctcttgtctttgtttgctttaaatctgtttctggtttagctttaaacaagttgttgttgtgctgtactgctgctctgtttttttcttctttttctgttttttcttggtaactaagttgcaggttttttaatccacaacaagtggcgcagtctatggggacagagaagaagatcaatcatgggttcaaccaagtttgacattgaaaaattctctgggtcaaatgattttggcttgtggagaatcaagatacaagcagtgttgatacaccaaggtttgggtgatgctttgaaaggtgaatcttctctccatgcaacaatgtttgaaaaagaaaagaaagatttaaatgaaaagacaaagagcacaataatcttgtgtctcggagacaaagctttgagggaagtagcaagagaaccaacagctgcagcaatttggttgaagctggaatctctctacatgacaaagtcagtggcaaatcgactcttcttgaaacagcaactttattctttcaagatgacagaggaaagaatgctgtcagatcaaattgctgactttaacaagattctggattatcttgagaatcttgaagtgaagatggaggatgaagacaaagctttaatgctgctaaatggacttccaagcagctatgagcattttaaggatgctatgttgtttggaagggatcaaaccattactcttgaagaagtacaatcatcaattcgaaccaaggaaatgcaaaggaaacaggaagtcaaaactgacagcaatgcagaaggtttgaatgtgataagaggcagatcagaaaagaggaactctaagtcaaataagcatagatcaaaatccagaaatcaatctcaaagcaagttcaaatgtttccactgtcacaagaagggacattacaaaaaggactgccctgaaaggagagaaaaagattcaaagaaatatcaagatccaggagatgtggacattgctcaagcaggttatgaaactgttgatgttctagttgtctcaaattctgagattgaaaagaattgggttatggattctggctgcacctttcatgtgtgtccaaggcgtgattattttgaatcactgattctgaatgaaggtggagtagtgctgttaggaaacaacaaaccatgtaaagtccaaagcataggttcagttagattgaaaatgttcaatgatcaagaaacgctcttgacaggtgtaaggtatgtacccgaaattaaaaggaacttgatttctatcagcatgtttgatgctttaggatacactacacaaattgaacatggcatgatgaaaatatttaaaaattctgtgatgattgctaaaggaattaaaataaatggtttgtatatcctagatggttttactgttattgcacaagctgctgttgctagtcaaaatcagcatgataaaactagtttatggcatatgaggttaggacatgttagtgaaaaaggtctacttgaactagcaaaacaaaatcttcttaatgttgataaaatagaaaaactgcatttctgtgattattgcattttaggaaaagctaaaagagctagttttggagtaggtgtgcatactgcacaaaaaccttttgaatatgttcattctgatctttggggtccaacaaggacatcgactcatggtggttgtttttattttctgtctataattgatgatttttctagaagagtttggatctatgtccttaaaaggaaaagtgacacttttggaaaatttaaggaatggtatattcaaatacaaactcaaatggaaacaaagcttaaatgtttaagaactgacaatgtcctggagtttgtttcagagcaattcaatgagttttgcaggaaattaggaatccaaaggcacaaaacagtggctaacactcctcaacaaaatggcttggcagaaaggatgaacagaaccatcctagaaagagttagatgcatgttgttaagtgcagggttaccaaaaagtttttggggagaagttgttacaactgctgcctacttaatcaatagatgtccttcttcagctttaggttttaaaacacctatggaactttggagtggaaaaccagcagattattctaatttgagagtgtttgggtctctggtttttgcacatatcaagcaagacaagcttggggctagagctatcagatgtgcttttataggatatccacctggaatcaaagggtacaagctttggaggatggaacctggtgaaccaaaatgtatcatcagcagagatgtgatttttgatgaaaccaggatggctatgaaggctaaggatcaacagcaagctagcagtcaagacaacaacttggataatactgaagttgaggtggagctaccaacacaaagcgttcaagttgaggaaactgaaaataatcagcaacctgaacctgttgttaatgattatagcttggctagagacagagttagaagaaacattgtgcctcctagaagatacggacaagctgatttgatttactttgcattgacagttgctgaagaaattcaagctactgaacctagaaacttcaaagaagctttgaacagcaaggaaagtgaagaatggatcacagccatggatgaagaaatgctttctcttgagaagaacaaaacctggattttagttgatccacttagaaatcagagagtgattgggtgcaaatggatatattcaagaggaaagaaggtgtacaagatggtgaaaaggctagattcaaagaaagacttgttgcaagaggtttctctcaagttgaaggaattgatttcaaagaaatattctcacctgttgtgaagtgttgctccatcagaatattgctggccatagtgacccaatttgaccttgaattggagcagttagatgtaaaaactgctttcctacatggagaccttgaagaaaccatctacatgtagcaacctgaaggttttgccaaggaaagtgggaaggtctgtttgttaaggaaatccttatatggcctaaagcaaagtcctaggcaatggtattagaggtttgatgacttcatgatgaggatgaattttcaaagatcaaattatgataattgtgtgtacattctgaaaagagatgaagaagtgcttttgtatttgttgttgtatgttgatgatatcttattggcaagttcaagcatggatcaaattgatagactcaatgataaattgagctctgaatttgaaatgaaggaacttgggaaggctaagagaattctaggaatggacatcaacagaaatagatcaaaaggagaactttttctgtcacagcaaggttacatgaagaaagttgtaagaaagttcagaatgcatgagtctaaatctgtttcaactcctttggggcaacatgacaagttgtcaacgaaggatgcaccaaaatctgctgaagaaagagaaaagatggcattaatcccttactctaatggagtgggaagattatgtatggcatggtttgcagcagactagacttagcctatgctgtcaacatggttagcagattcatggcagatccaggaccagcacattggggagctttgaaatggaatttcaaatatctaaatggttcattatcttctggtctaaagttcaaaagaaagatgaaggatgaagaacctatcaaaggttacacagattttgatttttctggtaacattgataccaggaaatccttatcagcttatgtgtttaccttttttcgcactgctgttagctggaggtatgttcttcaatcagttgtagctttatctactactgaggctgagttcattgctcttacagaagctgttaaggaagctagatggatcaaaggattggtaggtgaaattgggatagcattagacaatgttactatttcctgtgatagtcaaagtggaattgagctttcaaaagatcaagtttaccatgaaaaatccaagcacattgatgtccgcctacacttcattcgagatgttattgaaaccaatgaggttttggttgagaagattcatactgaagaaaatccaactgatgctcttaccaaatctataccacaatcaaagttcaagcattgcttggacttgattggattttgtgaagagtaatggtactgtaaggagaagaagcaatatgtgatctagtgacaaggtggagaattgcaaagatgtgtcactatatctagctgtcaagattagagataaaacatatttctgataagttagttggtggccaacaactaacaatttttcagtttctgtttttagcttttattcttgatagctaatgctcctttcattgctatatatatagaggtgtagcagtagcagtgtaattatgtaggagtgagtgaaggagtgtgtgtaggacacaaaacacagagaggaagattggagtgtatgagagatagagtgaggcttggtgatcttgaatgctgttagctaaacaatgaaagaatcaagcaagattctattgtacatagagatctttgtaactcttgctccataatagataagtttgcttcttttcccgtggatgtaggtccctgtgaatgaaccacgtaattggcttgtgttcatcttctacctcttgtctttgtttgctttaaatctgtttctggtttagctttatacaagctgctgttgtgttgtactgctgctctgttttttttcttctttttatgttttttcttggtaactaagttgcatgttttttaatccacaacacaatttgatgccgcacagtggcaagtggctatctggcatcttaataaattatttcatccaaattttaattttttgcagcaatgttatcataggatcatgttccataagtgaattgatgtgtggttcattccccatataaatggaaaggggattcaaagtccttaaattgtgttgtgctttgtactattgcataagaggattttatttggacttgaacctcagcttataattttttctttttacataatttacacaattttgtttcaatgtgcagtcgcttgacgatgaaaagcgaaggagaaataagatatgtctttgtaacctggttgttgattaagtgcatttgtagtaccatgcagtgagaagaaagacgagggatatgtgtaacaccccaaaattttgggaattacagacaattattaagagtaaaatcgaaaatttagggaaaaatgacaagaacgcccctgaataaatttcagaaatgacgtttatgtccctagggtgaaaatgacaattttgccctgaacaattctggaaatgaccaatgtatccctagatattttattaatgaccaaaattgccctaggaagtccaataagacattttaaggaagaaatgttataaatatccttagatgttttggaaatgaccaaagatacccttaaagtaacaattacagaggtatactgaacatttttttaaaatgacgattttgcccctagagtgagtagtgaaatcatcaaaatacccctaggtcaaaaactgaccaagatgaccttagaaattaataggaacctgagcataggataaaatactcttagatgacaacttatcagcaaggttgagggcagataatcctaaaatagaatttctacgaattttggaagataggttgaaaagagcttaatctagacaacctcaggtatcagaaaattataagaagaggatgaacataatctatagatttttctcttaattgtggaaggaaaagatttcttcaatgagttagtttagtaattttaataattcaaaagcaaaatagaccaataagaattcaagtaaagttattacatgcaattgaaggaaaaattggttgattagaattcccaatacaagctttggcggtatgatgcaagatcaatgaagaaaagctctaagaaacttcaagaatggacacatggatgtttaagaggtttagaaacttgctattggtccaaatggaaagctagttataaatgcttaaaagatatttgaagcaaattttattttgtttccttgggcagaaaacgtagacatttctaggccttatttcaaagatcccaacggtcaaaagctagatatgtaagttaggagtataccattaaaagtttaagaagatccaacggttaacaagttcagaatgaatatttttgtaacacaggttttgggcagaaattttatgactaagctacccacggatttgaatgaaaccaaatggaatgcaccttggacaagctagaacacgtgcaaaacaagacaaccaaggaagagtgtggagttttcttgaatcaagacacttggatggtgcaaaatagctagccaataagaagaaatcacatggaaagtagccataatgaccttagaaattttttagaaaaatcaagcattaagccaccctataaaaaggtgtaaggatcagaatttaaaagctctaagagagcttaggaccgtgcaaaattcctcccaaagctttccattttatctcttccaaattatacctttcacctaaagccaaaaacaaagacctaactcttggaagttcacgtgaagaacaacaatcctaggagcaaggatcattcaaattcaaaggaggagggttgtccaaaagcttaggaaaccaaggtatggggagtttatgttgagcttattttgaataatgttccttgctttatttcatgaagcttgtagactaggtgtttgataaattgtcccaaagagcttgaatgactatttgactaagtaacttgattctaaattaaataactaagtgttggatgaataacttgaactaaatttaataaagaagagtaggaatcaaccaaaaactagaggtagtctagttgtctttaaggaaacaatcatttaaagctataatagttaaataaaatatgttgacatatgtgatgttggccgaaaattatgctatgattctttgagtatttatgttaaatttggtgctagaaattggttggannnnnnnnnnnnnnnnnnnnnnnnnnnnnnnnnnnnnnnnnnnnnnnnnnnnnnnnnnnnnnnnnnnnnnnnnnnnnnnnnnnnnnnnnnnnnnnnnnnnnnnnnnnnnnnnnnnnnnnnnnnnnnnnnnnnnnnnnnnnnnnnnnnnnnnnnnnnnnnnnnnnnnnnnnnnnnnnnnnnnnnnnnnnnnnnnnnnnnnnnnnnnnnnnnnnnnnnnnnnnnnnnnnnnnnnnnnnnnnnnnnnnnnnnnnnnnnnnnnnnnnnnnnnnnnnnnnnnnnnnnnnnnnnnnnnnnnnnnnnnnnnnnnnnnnnnnnnnnnnnnnnnnnnnnnnnnnnnnnnnnnnnnnnnnnnnnnnnnnnnnnnnnnnnnnnnnnnnnnnnnnnnnnnnnnnnnnnnnnnnnnnnnnnnnnnnnnnnnnnnnnnnnnnnnnnnnnnnnnnnnnnnnnnnnnnnnnnnnnnnnnnnnnnnnnnnnnnnnnnnnnnnnnnnnnnnnnnnnnnnnnnnnnnnnnnnnnnnnnnnnnnnnnnnnnnnnnnnnnnnnnnnnnnnnnnnnnnnnnnnnnnnnnnnnnnnnnnnnnnnnnnnnnnnnnnnnnnnnnnnnnnnnnnnnnnnnnnnnnnnnnnnnnnnnnnnnnnnnnnnnnnnnnnnnnnnnnnnnnnnnnnnnnnnnnnnnnnnnnnnnnnnnntatcctacgcacccctgggctaccctgactggttggataagtttatttgtgccaccagagaggctgaggctatcttgactatggccactgatgttgattttatgagaagctgagatatcagtcatgcatcatataaaaagacgagcatgcatcttatgcatcgcacaatgggtatatgtatgatgatctatacactgtataagttgtgtggattttatctatctgtgtttttattattcaaactatgtttggcataaacttacccgagttgtgtctgtggttgacacctgtgatgaccccaattcatttgggcgagcagaggaacaggaaaacatgagatgtagatgaagattgttgaagaagtttgatgagaatctgtatactgtgatttttaattttctgtggcatgtaatttgtgataagttgtctgtatattattttggatactgtatttggactgtatcatggactgtattcttatcatatgaaccgtggtgaggaaaatcgtttagactacgaacaaatcattagcaagcaatgcaaaaagaattttagcggaaaatttacaactaagatcattttaatacaaaaaggacacgagtttttaattaaaatcaatcaagcacgagagagtcacgagaggcgttacaatatggatgagtaaaaatgggtgttacctagatcttgtgtctctctcctgaaacttttgggctcagaaacccacaacaaaagttactgttccttcaaaaaattaaattgccaaaaatggtactctaagtactccagctgagaaaggcaagttgtaacaccccgtgtgcacccggtgtattatcattaataatatcagaatcgcgcttaaatcattatttgaaatctagacggaagcgactgaatcgtatttcttgatcacattatgtatggattatcaaccatagcaatacacacacaatcaataatcatcacaagcatcatatcaataacgtacatgcccctgctgatctagttatcacaacatattcataggcagataagcagaatatatatatatatatatatatatatatatatatatatatatatatatatatcaaagtcacattcaggaggaatatcattttcattccataactaagttttgtacaaatatatacatcagttctgacacaacacatgtggtgatacaaaagagtgtcctccctcacatgagggtacataatcatctacaaagtatcagatggcctacatgccctacagccctctatagggcgctaaccaacaatcaatagcatcgcaaaatgagctatccagctctcttcatgtcatccaagatcatgcatgcaacgcctctcctagggcctcttgccctgaggctgctctcttctctcagaagagtcacctgaaaaacatgaacctcacacggggtgagatacatatctcagtaagctcagggtccgaggagggatctcctccaccctggcccactctccatgatacaaacattcaagcagtcacaacaactggcctcccggccctcataacaatatgagcaagtcatcttgctctatgtacggcggatctcatcaatgcctaatctcagtgtgagatcgtaactcacacccgtgccgtcccatcgggagctaccccttacgcatggacgcacgtatatggtacctccgagaataggcaatcaacagcgacgggacacacctatctcttggtcttaggggatcatcatcacccatgagcaaaccaactaggaggaatagccgtctcctagggaggtccatatccatcttactggccagaagatctaatcacaggcataatacatttctcaagcatagatgcacacacatatcattatgaggatgcaacaaccaaatgcatgcatcgtgaatatgaccatcactccacccggagtgtggtgtggcacaaacaagcgggaaatcatccccagggaccaagaacttacctgacaaagcctagctctacagttctctccctgatccgtggcacacgccactgacaccctcggtgtccagccctaatccaggcacgcacgcacatatcaacaaccattcaagcaatccatcaaacatagcataatcagaagtcctctaacttagtgttcataacagcccagcacacactaggcttctcacagacccttctgggtccagcacaatcaaagcatttgagtctccgcagactcaatgccaaatcacatacgatgagctcacacctcagtcaaagctttagagtcatcacaggttcaacacaagccccaaacaaacagctcaaatcaaagcatttgagtccacccaaactctatatagttcacatatcatgagctcacagcccattccaggcttagagtcactccccagactcaatgtaagctaacatagagagctctaagctctgtgcagttcaatacctcagaactcaattatagctggaacagtctatgccttactcaaggcaccgttcatatagcctctcaggcatctcacagtcacaatctaaggctcttgcttgtcatataaccatcagctagtgactcaacacaagtcactcattcataagcagagcccataatcaaagttcaccaaatccaattctgaaagctaatccttcatcactacacagttctaagcaagtttctctacaggcccctgggctaattctagccccaactcaaatgggtcactattcatagaaaacccccaaatcaacatttaactggagaaactcaagattcttacctcagaagtggcaaggaagacttctgaactacttctcctagccccaatgttcttgaatctctgtagttcccttgcctagctcaagttctacaattcctctgagaaaggaatctctcagctcaagatttcaaggggtttggatgaaggattttagctttctaggtgttcctcacaggtttaatggctaatggaagtgattttggctagcaaacaaggttctaggaagcttgggcactcaaaaatggaggtgggagccctgaggaagaagagaaacagtgtttctctccagaaatcgcgtgtggcctttatatactaagcctcaccgacattgtcgcgctcctggcgctgatggcgccagaatccagtgcatctggcgccactttggcgctcctggcaccaatttccagtgcatctggcacccttggtgccactttggcgctcctggcgctaatttccagcatctatggcgctcttggcgccactccggcgttgatggcgtcaaaaatcgtgaaaaatagccttctgctacagtgtcacgctataagcgtcatatcccacgctatcagcgccagctacagtacagctacagtattaatttttaatttttttttttttacaaaactttggttattatacaagccacctgccaattcaaactcgtcggaatcatctgatgaggatgaagtgagtaaaacacctttgtaacatggttggaaatactgaaaatttccaagtccattagggaatatgttattgtttgctgtaatactcacaatgcctttacattcaactaattttttctgtcacaactcactataaattccatcttattatttatctcctagccttcatttttattatgtttttttttttaagtatagcttatgttcttattgaaatctggaaattccacgtgtgggttagatgtggccttagtggactccaaatcctgtaacaccgggaagtgagtaggctttgcttagaggagggacctgtaaaacaaaggaaaaacactttgacgctcaagtaagtacatcaattgttaaagaatatctgagtttgggaactcagtataagatataaaatgagtagcttgaataatgcattcaagtactgtgtaccgaaaggttgtgtgtttagagagaacctggatggttgcatttatagcgtggagtatgagccttggaccattgcttattgacaatctgttgataagataatagcatacagttatctatattcaaataggagataatgtgtaccttattgatatattgttacttgtagataagtaacaactagtagataacttgttgagataataaggtggttacacttatttgaatatcctggcataatagatatgcggttaatgaggagatatattgctggtgtccgtgctcctgttgaaggtcgtcatccatgctcctgtagcgatgttggcatagaacccggacacgtatgtttgtgttgacacttggaggctgaataagcgtctattaatgtggcagtactgacgtggagagtatccacgtgtacggtgacctttatgagatagtcacatgtcattttattattttggactgtacaacttaatttaatggtcaatatgtgttaattagactgacttttttgttattaatcacacatttttttggataaatttttgtcttgtatttataattttcgttatactagctatagtgattttggactaggttgctctgtgttactatctaggattaatgaatatagtgaacttaagatataacgtgttgcaatattgttttattgatgcattttcaacctttctttttattagtttagtcttcattgtaaatgacagctgttcttagatttttttcacacttttccatgaaagtttatgcattccacctatttnnnnnnnnnnnnnnnnnnnnnnnnnnnnnnnnnnnnnnnnnnnnnnnnnnnnnnnnnnnaaaaaaaaaaaaaaaaagagactaaaaattgattgatattgtttgttttaataagtatatagtgcaaaccactgatataaatgtagggtaattaactttaagctatagaaaattccagagggcctataatgaatattttaagatcttaccaaggtggcccctgctgcaggcaagaatggacttgcttctacaaagaaaactcagccaagtgaaatgcacctcgttaaattgaagatagaaatttgcttgaaagtgaaaaatctcttattcctgtccttgtctctgcattgtttgtctgatttgtattcttctatacgttttgtgtgttgtgaagttgtccattgcttataaaagtggtgttcctatgattgctgatggtggcatctcaaactctggtcatattgttatcgcttgtcattgggagcatcaactgttatgatgggaagcttcttagctggtagtcttgaggctgttggggcttatgtatatcaggtatgacagagactaccatttacagcttaaataaccaaaaacaatgaaagatacataaagaaataaaaaaaaaaaacacacccatgttcattagaatatgaatcaaatgtgaacattaagtcattattaggctgctcagccattcatgcttaatttggttttctgttgtcttaatatgttactgatgttcttttcatacaaattggatacttaatttttttcatatcagcatattgctttttcttaagattcttcatctgggttttcataatggagttcaagcacacttgggtttcataattgacttctctaatcccacaagtaatcatggacgttggtttgttagttaaacacgtcttatgtattaactctacaataactacccaatatatgtacacattataatatttgcttatatcataaacatatatcttaatcaatttggattgcaattgacttgttaataattaaaagtttatattgtaaacatgtatcaaaatgtcaggcttaaacatcataaatgatttaaacaaatgtaacacaacggagcgattcgtgcctatgaccacgactaatgtaccttattacaatagtgaatttatttctcacttactaattaacaacaacaaagcatctattataattatatatatttttgaaatttcgaatcactacaattctatttatatcctaaacatacaccttaaacaaataaaatggttgagtggagcaaagcgatccgtatgtatgcacacgggtaaaaaaactagttgactattacaagttactctaaatgatctattttatgggatcagaaactttgcaattgttttccaccacatacattctagattatgatgtcatctcttccataaaaatattgcaatgaggttttttttttaaatgaggcagcaaaacaagtacttgtcctaggcctacacaccatcaagacaagggcaaaaactgatcatagagtatcacaactcaggcggggactggcacatgagacgaggattcacatcctcgcaaaacgacgttggatcacttctcataggtaactcattatttatgcaaatcaaactcgtaatcaaaagataaaccaacaaatgattccatgtaccaaatgcaagacataattaaaatcagtgttggagtatccttaaaccaaaaggtggtggtgatccataacaaaccaaaagtgtctaatctaacgaaacaaactcaacctgaaaactgtatcaaagccagtgccgaaaataacaatccatcgtcactaaataactccaaaatataaaccttaagaaacaaggttgtcattaagagataatgaagccagctgatcagcagtaccgccagcctgctgctgagcaacatttcttagcacgtccattgcctccgccacctttgctttcagggcttctggcgactcgagcaaatgcagaacttcagtctggtccatctcaagaagcatgcctgtcactttggcagcattgtcaggctctaactgttccacaagggggtagagattctcacccagcatctacaaatatgcaaccaacaaaaaatagttagttacaaatactaaaaggcagtaaatgatgctagggcatatccaaactttacagcaatgatttaagtttaacttggtaaaaatagcgaaagtgaaaaacctaccgtcctttgctgctctggagaagcattagccagagctgttgccaaagccccaacaggaatttgctgggagattgatgcatcacgcagcggcatcccacccacatcatatggaacagaaaacatacctccagcaaccccaggcataggaacatctggcatacccctaccaggaggataacgatagacacgccccctaggtagcatctgtcaatccaaaaattatcaggtcaatgttctaaacaagatcatccacaaaaaatatgaacaaagaattgcatgaacctgctgtggcatcattggaacgggctgctgggactgctggactgcacctgcacgccttccaccaggacgctgtccctgttgtccctgctgaaccattggcacaaagaaatttggcacaggagctgcacctggcctcataccaggaacaagttgttgttgatacccaaatccaggctgagaaaaaaaaatcatggtcagaaaggagaatgattatgaaattactccatggagccaaatcagaggaataacatcaagcaccattcaagattgcactaattttagtctaggtatagacagcatagaagagattacctgggaaggaatgatagcaggaggcccttggccataaaatatttgttgaccaatacctggaccacctgggggatacattggcacacgaggaccgacagatggtggcattccaacaggccgcatttgagcaaactgagcctgcataaaaaatttagtccaacatagaaatatccttacagtcactgagattcaatagccaaatacaatacaaaactaatcataatttgcatttataacactgatttgcaaagcacatcaacaatatagcccatgatattgcttgtgcatgcatgagcaatttgtagtatgaaatacaattgaggacacagaaaaacatgtaaactattattcaaacaacccatattcagctccaattacaatcatcatatcttaagataatggaaagaaatggcagaaaattgcttgtgcatgcatgagcttaaaatgacaacactgcaaagatctaatcctgcattggtaatacataatttcaccaacagatacaagataaaaagagctcagcatttaaaacaagacatacctgcagtctagctctcctatcttctttccgttgggctagagtcacatacagaggtttgcttaccaccattttgccattcatctccaggagctaccaaaaaaataatgtaaaggaagaaaaaaaatcattttcaaactaaataggccgagtattacttttacaacgaaaatatcctatgacttactgctctagatgcctcctcaggagttgagaatgcaacaaatcctgatccacgacttatgccatttgggtctctcataacctttcaagtgaaaagcacataaaatatattatagactatatagcaaacaaacatttagtgtcaagtcaattgcactacaaaccttgcaagaggtaatgacaccataaggggagaacagctccttaagcttatcatcactgaggctatcatctaaatttttgacatacaagtttgccccttgatatttatcagcagcttctttcatgctctgctcaaatcgttgtttcaattcattctccctttcagatttcttttgagcttttccaacataccattctttgtcatcaaactttttgccattgagagcctcaacagccctagcagcatcatcagcattctcaaaattcacaaatccaaaacactttgatttcccatctccatccctcattactacagcactagtaatagttccaaattcaccaaaaacattcttcaattcatcatcagtggttgattctgatagattcttcacaaaaacattgttgaattttgccttgtcagcagtactttctctctcttgcttgcgaaggaagggtcccacatacacttgtttatcattcagcagcataccattcagcttctctatggctttttgggcagattcctcattatcaaattgaacaaagccatagccttttgattgcccagatgaatctgtagctaccttgcacgaaaggatattcccaaatgtagaaaaagtatcatgcaatgccttgtggtcaattgccctatccaaattctgtaataatccacaaattcaaaaggaaataaatggaaaagtcaagaccaactagaacatgcaatatagaagcttagcagaaatcctcccattaccagacaatccggaagaatgaagacatttataccttaataaatatatttccttgcccacttttacggatactgggatcacgatgcgaatacataatacggatgggcctgttattgagaggagtgaagttcagaacatccaaagctctggcagctgtaaacaggcagcaaatatgttagaaacagcaagaaaagaatcaattataaagattttgggcgggggatatggttatcacaacatcaacagcataaatagaaagtattagtcaagcatagaaaattatgaggatctataacagaagatcaagactatgggaattgggaacaaaagctaataagataattgaagaaccaaatcaagaattttcatgatcagtgataaattggggaaacacactcattgatgtagaagggtcatggccattcagccaataacaggagggagtataataagaacacaaaccacctcagaatattttaataattcatctggtttattaaatttaaaatgatgatataaacccatcttactgttaatgaacagagtcatcaaaagaccaatttctaagaaaattgcatgtatattacccaatcaacagaatgcctaccaaacaccagaggtagactacaaattccagaagcagactactaaatgtctgggataactctaaaggattttgttataactaagaccatgaatccaaggcatgaatcaaaaggcaatgctcaacaacgagagagtaaaactcataattttaatatcaaaagacaaatagaagagaaattcaaaatccatcattttgcaaatcaattaactttaatttacaataactacaaactattctagttctccaaaataacctatcaatatgaattaggtagctagagtgcaagtatgttctctgtaggtcagatacactaaaacatcccagccctctcctggaaaatagaatttgcaagactacatttcaagtagtacaatcaaactggcttcagattccagatatttgcaaaacaatcaccaactgaagaagttactgatccctaaaaggcaattattatatatttacattaacaactacaactaatgcttcccaacatatcccttcacacaaggaaaatgtcagtgttacattaaaataataaaattcattgggtggtgcaaatatcttttggctgatttttagataattaaaatagaatgaacattttccctcttaatgactcaaaagtcaaaacaagatactacagaaagattagctgtgacatagcatgctaagtttcatttcctgtggaaaaaagcatgcaaagaaatttgtgtagtatttcacaaaaaaaaatcaattaccagtgcacctttcagtaggcataacacacctgttcgcaacaggcgtgaccaacaattatgaagcaataaatcttaccacaaaacaattacaaaacaacatcaaaataactgagttgctacttgagcagctcatgcaattaaagaaattaaaggcataacactttaactgagataaaccgtaaacgtcaccaccacatgcttgtaaattatccagctgctttcacggttcagttttgtctctattcattaggttacgccaaaacaaagaagtacacaaaaagcaatagctggaataaaactttccgcagagaattaacaccaacacagctacgagttaaaccacaatttaaatccaaaattagtgcctaaaacgaggttttaaattggtagtcgtgttagtgccggaaaatgcagacaaatccggctcatgcggccacaattcttaaaagttaaaaactttggtccataatgcaagcatgaataaagtactaaaacatatccattcactcagaaaccaatttcattatcaaaccaaataaacaatacaaagcaaaaaaaaaaaaaaaactattttttcttaaaaaaaaataaactgctaaacatcttgcgggttgctacattcattcagagataaagcaacccaatttcataatcaaatcaccaatacaagaaaagataaaacaaaacaaaaaaatcaaatttccaacgcacactgagtaataacatgaacaaatccaaaaagacatttttctaaatgaataaataaaaaactaaccatcttgcgggttgctaaagttgacataaccataaccgagcgatctcctactggtcaagtccctgcaaaccctaacggacacgacttgccccaattggttgaacaaatcatacagctgggcgtccgtgacgttcggttcgagatctccgacgtatagcgacgtcgtcccgaactgatttccagcaccaccggcaccaccgccgttgggaccgggaatcgcattctgaggcggaacctgaacctgagccatctcaaccaaaacaacagctacaacaacaacaaaaacttatatttctctttttttccccaagaaaatccctaatttttccttttttttttctttttttgtttgtttctcttccccctcctcttgttattggacacaataaaaaccctaggaagaacagaaaacctaactcagggaacgataatgataacacggtcttcagagtaatttttaattttttttagagaaaagcgaggagagggaagcgggatggatgcgcggcggatagggagtggccgccggcggaaaccacggcggcgcgtgagagtgaaaggaaattgagtgagagagagagagagagagagagcagtggatactgcgctgagaaaaggaatggggaaaggaagagtgagagagggttatagcaggtaagagagatgaattgatgatggtggtgtaaaccctaaacacaatccagcggggagatctgggccgttggatgagggaggtggtggggcccgaggcgagggatagagaggattgcgaaagcagaagaagaaagatgaagaagattcttacgaggtgaggtagaaatgagaaatgaaatgtgaaagaaagatagcaactacatgagataagaatgagatgaaatgatgatttaccgcacaacttctaaactgttacataagctcaagctgtaactaattgtttgtcttcctctatgttttttttttttcttcagcagtgctatttagcaccaaataaacaacacacaacactagtatggatgggctattgtttttttaaaagtaaatattaattaaaattttaaaaaatatatgaaatatatttttgccacacacatgttcgtgcaagtttcacgaaaacttttttcgcacaaaacagcaattacctttctatttcttttttcacttgcattaaataaaatgcatcgtaatttttttatttggagaatttaatataataattaaaacatattcttttttatagtatattatttttatacgttaaattgacatgagtttatttcgatttagtagtgtaatacttttattcgtgaactaattaaaataagattattttggtttactaatgattttagatttgaattctaagtgtgcggatgcaataaatgtaataaaaaattattaagaaatattagtttttattttttattttttattttttagcagaagaatcaaatctatcatttttcacattttctttctttcttaaccagacaattaattgtatatattcaaaattataaatattaaaaaacatacaattgtgtttcacaataatcgtacttcatttgcgtaaaattgactcaaataattgatgattatcaaaactatattcgtagtgtaaaaacattttttatactttttagtgttatgtaatttttagattattatgactttatgtaagtannnnnnnnnnnnnnnnnnnnnnnnnnnnnnnnnnnnnnnnnnnnnnnnnnnnnnnnnnnnnnnnnnnnnnnnnnnnnnnnnnnnnnnnnnnnnnnnnnnnnnnnnnnnnnnnnnnnnnnnnnnnnnnnnnnnnnnnnnnnnnnnnnnnnnnnnnnnnnnnnnnnnnnnnnnnnnnnnnnnnnnnnnnnnnnnnnnnnnnnnnnnnnnnnnnnnnnnnnnnnnnnnnnnnnnnnnnnnnnnnnnnnnnnnnnnnnnnnnnnnnnnnnnnnnnnnnnnnnnnnnnnnnnnnnnnnnnnnnnnnnnnnnnnnnnnnnnnnnnnnnnnnnnnnnnnnnnnnnnnnnnnnnnnnnnnnnnnnnnnnnnnnnnnnnnnnnnnnnnnnnnnnnnnnnnnnnnnnnnnnnnnnnnnnnnnnnnnnnnnnnnnnnnnnnnnnnnnnnnnnnnnnnnnnnnnnnnnnnnnnnnnnnnnnnnnnnnnnnnnnnnnnnnnnnnnnnnnnnnnnnnnnnnnnnnnnnnnnnnnnnnnnnnnnnnnnnnnnnnnnnnnnnnnnnnnnnnnnnnnnnnnnnnnnnnnnnnnnnnnnnnnnnnnnnnnnnnnnnnnnnnnnnnnnnnnnnnnnnnnnnnnnnnnnnnnnnnnnnnnnnnnnnnnnnnnnnnnnntaaagtagtatcttaaaaaatattacaaattactaaaaaaaaattagtttatcaaatagttaaataaatttgtcaattaataaaaaaattaattaatatatcttatcaaatacactcttaatataatagatactctatactattattccctcatttcatattataggtcactttatgtattttagtgaggtaaagataaccaatattaaaagcaaaagaaagctgatgatttatttttttctaaatttaaatataagaagaaggaaaatatgtataattatttaaaatataagtaaatttcaacttattcaatgatactatcctcaaattatttggagttataagtgttgtgttggataaaggtgtccttttcttaagttttttcactaaacttttttatggtagtttttaaaaaaaaaattaaaatcttaatccttttaagtatttgagtagagaagatataaagttggttgggtggttaaaaaaataataaaaaaatgtcataaatttgatcctttctaacaaaaattaagaaactaataattaatatttactcataaaatattatttaatcaaagttttgagtcacacttttaacaattgtatcctatacccatgggctcttcattctccactgtccaaaggcacaaaagtgcatccaagtgaaatttaagatcgaataataattgtagaattagggtagtaccttgaattttcatcagaaagtaaaaaaattatacttacggttgttaacaggaatataattgatatatatatatatatatatatatatatacttaatatattttactcattttcattgaatcagtactttcaaatactcgttaaaagatatttaatatattttattagtttttaattctaaaaatattacataatgtttatttttaatataagaaatgttttaaaacattttttacgttttcttgtttgactaatttttctaagaaatccgtaacaatcactattattctctattattataaattgttaattaatcaaaaataagtattaattaattttattatttaatataataaatatgttctatatttttaataaatgtttttttggaatgttaataataaatttcattaaagaatatttaatgcaattaattaaatgtttaataatacagagacaaaaatattaaatatattgtacttttaatataataaatagtttttacttttattactctttcatttcacattatatgtgnnnnnnnnnnnnnnnnnnnnnnnnnnnnnnnnnnnnnnnnnnnnnnnnnnnnnnnnnnnnnnnnnnnnnnnnnnnnnnnnnnnnnnnnnnnnnnnnnnnnnnnnnnnnnnnnnnnnnnaaaaactaattcattctttcaattttatagttatggtgatcctttttttttcctttatctctttcatttttctcctttttcctttcattccaagtttttctcttctcttaatttgagattgagactccaccataaaagattcattttcttcttccttaagcctttttgagttaagtattggttggtaagctcatatctctttatttctttgatctcttggtccatattctttttccaccacggaactatatgatgggttccatgtataattttgttgggtgggtcaaaatttgatcaaagcttactttgattgtagttagacaatattctagttggaattgcatagggacttgagaagagttttcttctaaaccataatgatatttcccttggtatcttcctcaagaaattagtcaaacctatagagtaagggaagcttgttcttgatttgagatgaattttttatttgatgttgtaaatatgtgaattttgactttggattctataatattacgtgtatgtaaattggtttgagcttaagtcattcgggaaaccatttaagggtaaaaatttgaatttttaagttctcttgtcacaacttaagcatgtccattcaatagtcttaacttaagcatatgacttaagcgagcccataattgagtcatgcttaagcgagttatgttgataggttctcctatgtgttttctaagctagtttaagcatgctcatttatggtctgacttaagcgagaccttaaactttatgtgttcttgaatgactctccaaatgagataatatttgatttgtgagttttataactacactaaatttgatttgagttgaaatcatgtaattcatattcatatgcagaacttgatgaggtgattgtaagaattataggtgtgaaatgtcttagttttcttaaatgaaccataatttagttcttatgtgggatgacatgaatagtaaattaattatatgatgaacattatgagattggttgaatatgtttgttcatatgtagcatgatatatggataaacacataaattaatggtgcttaatggactctcaacctaatgttgaagattttcattttaattaatgagaataagcatatagaatagatgaatgaatgagtttctataaatttaaggacttacaatccttacatagataagtaatacctatatctatctattttttatgcaataatacttcctccacagtatcaaattatcaaatgtagatatacctaaatcagtggcggacgtatttgggggcctggtggggcccaggcccccccaaaaataaaaaaatataaaattcactattattaaaaaagtttataattgtgagccccatcatttttataattgttatggcttttcatctccaaaaaataacggcacttttatttatttttaatatctttttcccaaaaacagcagtactttcatttattttcaatatcttttttcaaaaacttttatattacctcctcctgcactgctagctcttcgtgctttttctgggctgctgctacatcacatcctgcactggtactgctgcacttattccaggtttttactcatgcttttcttatttggattcattcaacatgttttcactttttagtagccaagccaattcaatttctttttttactccgtgttatataaaatgattcatgaaggataaattgaaggtaaataaaagtgttgtagaacatatatatttctgatttattcttataaaaactacataaaaatgatataatattgttatttcaattttaaaagtgttgtagaacatatatatttgtcgtttattcttataaaaactacataaaaatgatataatattgctatttcaattttaaaagtgttgtagtcgtagaacatatatatttcttgtttattcttataaaaactacataaaaatgatataatattgttatttcaatttttaattacacaaattttaattaagtgtatgaaatatattgtagaatgaagagacaaaatagggacattacaagtttcttcaaaaagaaaataaacagagaaagtggagaaagctctaattttgatcaccaccaacctcgagcaagcactccaaattctccttcgattgtgaacactcctccacctcaagcacctggaaataatcctcaaagtgatggaggtgaaacaattggagttagttcgactccagttgataatgaagcatcatttgatgatgaggaaagactaagaacaattgatattgttaatcttcctcaagaccccggaaaaaggaaaaggataagtgctttccatcctgatgacagagatatcgtaaggagagcatatcttcaaagaaaactttgtcaaccaaaggattacgagtttccccaaagattgtgcggaacaaaagaacgtcgatttaaccctaaatggttcaaaaaacataaatcttggcttgagtatagtgtggaaaaggacgcagtattttgttttccttgctatttattcaagagtgataatgctcctgggggagatgcttttgttggtactggatttaggtcatggaataaaactgaaatgtatcagaagcatgttggtggacatatgagtgctcatagtcaagctgtgagaagtcttgaagactttaaaaatcaaaagggttctcttccatcttttttgaacaaacaatctaagcaaattatcaacaactataaaaggcgactactagcttctattaaaagcttaaggtggcttttacttcaagcgcttccggtgcgtggtcatcatgaaggggaagattcattaaataggggaaattttattgaactcttaaagttttatgctatggataatcttgatgttcaaaaggttatcttggaaaatgcccctcaaaattgtcaattgatatctcataaaattcaaaaagatatcattaatgcttgtgcaaaagagacaaccaaagcattgttagaagaacttgatgatggtttttttgctattcttgttgatgagtctgcagatatctctgataaagaacaaatggctctttgcttgaggtatgtcaacaaaagaggagaggtgacaaaacgctttcttgggcttgtgcatgtcgccaacaccactgctttgacacttaaaggagcaattgagtcattgcttatggagcactcttttactttttcttcagttcgagggcaaggttacgatggtgctagcaatatgcaaggtgcaattaatggccttaaaactttagttttgaatgagtcatcatctgcttattatgtgcattgttttgctcatcaattgcaattaacacttgttgccgttgctaaaaaaaatgctgattgtggatggctatttgttgatgtacttgcacctttgttgaattttgtgggaggttcacctaagaggaaagaatttcttcgacaaaaacaagttgaagatgttgttaacgcattgtcttcgggtgaacttgaatctggaactggcttaaatcaagagcttagcttaagtaggcctggtgacacacgttggggatctcatttcaaaactattttgaatgtgattaatttgtatcctacaattctgaagtcacttgatgctattggggaagtttctgatagtgtcgacaataatagagtcgagtcacttacacatttgttaatgtcatttgactttgcttttttagcacatttaatggtggacatatttgggattacaaatgaattgaatttggctctacaaagaggtgaccaagatgttgtaaatgcaatgtcaatggttgatgtcgctaagatgaacttgcaacatatgagagaaaatgggtgggaatctttgattgataaggtcatttcatttatgcttaagcatgacatggaaagtgagatccctaatatggatgaaaaatatattgtgcccgggagaaggaaatttcgtggtagtgcacaaccgccaacaaactttcaccacttccgagttgaagtttttttaagtgtcattgatctacaattgcaagaattggaaagtcgatttgatgaaaaaagtaaggaattactcatttgtatatcttcctttaatcccgctaatcggttttcttcctttgatgttggcaaattagttcgacttgctgaattttatcctcatgaatttcccagcactgaaatgcttttcttggaacattcacttcggaatttcattgtagatgttcaaaatgatgatagattttcagaggttaagaaccttaatgagctttcagtgaaacttgttgagactcaaaagcatgtaactcattcaagggtttacttgctcctaaagttagcactgattcttcccgtgacaacggcaagtgtggagagagcattttcaaaaatgactctaataaagagtaagttgcgtagtactatgggagatcaattgctaaatgattgtttagttactaatatagagaaagatttgtttttgaaagttaacattgatgacattgtaaaccgttttccaaaatatgagaactcgacgggaacaattgtaaaaagtttagttttttttttttgagattttttatgataaataacattttgagtgcatggtttattacactgtgataaaaaaaaattactttattattattgtatattctttttgatattcaatgccccccttgttcaaaatcctgggtccgccactgacctaaatgatcaaaaggtaaaactatattaagaaatgtacctatattaattgttcgaaactgaaaatcttcctcaagtcagattttgcatgacatttcatgatgtatttatatattaaattaaagtatggtttttattgataaacgaatgatattgaaattgtttgaattgtgattatttatttagaattctctttgacttaatttaatcctatcttattttttaaaaataaactatggagttccctttagaaaaatactttgaagttattctcattccactggcgtttcttatattcttttccaacacaattaaaaggacactttctttagcttcgctcactagtgaatgaggtgtcgaatacaatggaatgctaattgctaaatgatgatcatgtggcattttttcaagttttgttataggagtgggtgacaacgatagtactctaccgactaaaaaggaaatgaaaaaaaaagatttatatactcttctagaaataatttatattttttaatattttacgaagaaaatattaaattataattttatttaatcttttgaaatttaaaaagcatttatttttttaatagaatgagaaaatttaactcgacaaccacactttctctgtccttatttttttgggtgaaatatcttttctctatttcacattctctcttcctcgttttccatcaaatgaattatccttttaatcacgtgatcatagaaattttgatatattgtagtacaccctacatactaaatatcattataactaaaaaaaatataagtgatacattctaaaaaatataaatgaccaagtttcgcaatttaataatttcttaagatcttatcatttgtcacaattgaataatcagtataatatgaacatgatattgtgtcttttcacacacatatatatatatttttacttttatttaagaatatatcaaaattactcctccatttcaaaatgattggctttttaaaatttaatttttttaattgattgacattttcaaatttattaaaatattatttttctaaattcatctcaaataaacaatcaacatgatgatttttattattatgtttattatttttnnnnnnnnnnnnnnnnnnnnnnnnnnnnnnnnnnnnnnnnnnnnnnnnnnnnnnnnnnnnnnnnnnnnnnnnnnnnnnnnnnnnnnnnnnnnnnnnnnnnnnnnnnnnnnnnnnnnnnnnnnnnnnnnnnnnnnnnnnnnnnnnnnnnnnnnnnnnnnnnnnnnnnnnncaaaatgaactaataaaagttactctgagatagagctacaacatcattgagatctgagaggaatgctaacaatataacttttatttctaacatgcacagaaggtatgagtaagaaataatttgtgcatgtgaaaaatattttgtttgaatatttaatagtagtgtatttataaaatttgataaaggaaatacatatattttataaaaattatttcattattcgagttatctatttatttttaatcttcatgagaaactttaaaatggcagtacttcttaatgaaatgttgaacatgattatctccttaaagaatacctgtaacaaaaagagtgtgttgaatcgcaataatcttaaacaaataatgatgagctttaaactactttattacaaaaatactggttttgcagttaataataatggcattgactcaattttagcgatttgcgtttttctagaagttttctttagttccgaacacaattttaaattagtactgaatatttaaaattttcaaacggaagaagaagatttagaaacggaacagttacaccaaaagaaacggaacagagcatgaggaaagttccttgtgctttaacaagcaaacgaaccaactaggctaaggcaagggccaaaagctcaaaggcacgaataagacatcaacctacaaccacgtaaaaacaaaacaaaaaactttgaaaattggaaatgtcaatgaatattggtggagtagtgtaactgtgtaagatacagtgtttgcgtttgacaagttatgaatttgaattcttagttgaggattgtaggtaatatattctcttaacatactcttcttttaacatattttattattaatttaaatttattaaaaattataaaatataattatttaataaaatgtgagatttataattattttttatttttaataaataaaaatatacaaataaatatgttaaagaatatattgctagcatttctcttccttatttatatttttagaatgatataaacaataaatataaatatctttattattaatatatgagtaattgtattttttggggttgagactgatcaatctttctcattttagtatcttcctatttatgcatttgaggtcgtaaaagtggtgaatctctcattttttctcggtcgaattttgctccacttgataataacttcaacaacaaaccatttatgagcactcgaccaactatctctcttattgagtgtgttacaaggtcgttctaaaaatctcatagtaactattatattagaaataatgaatcgttatatatactaaatttcatatgagtcaaacgtaaaataaattacattcacatttaaatatttctatattaagtctcttgttttcctaaatacaatctagctaaaaagaatattaataaagatatttacataaaaaacattgataaaattatttatattgtttatttttactaataaaaatatttaaataagtatgtcaaaaaatgtattcttagtattactatttcttatatatatctttagaatggaataaatgataaatataaatatctttatcactaataataaataacaaatgttatttgaatttagagtttttccccctcctatttggacggtgtgccattctttttccttaaattatagtgtaaaagaaaataaaacaattcaagataaacgacgccgttgtgaaaatgccgacgtcgactgttatgcgcaagtgtcaacgttgtcctgattacaccgccttcaacggaaaagtaaaggacgttcacgtctcctctttttcccttcaaccatttttcttttccatttatattatatttattcatcaacttttcaattttcattcattttttttccaattattttatcattcctctgagataaagctacagcaccattatcattcatctccattactttcccattttcattattcgatcctcgatccctctcccacgcaaaagattcatcaccccaaaacccaattttttttattaataatacaattgcaattatttttattttctcagaaaaaaagagaaatgagttcgattcatttgttaaacactcttgctcttccgcttcgttctttttctcctccgtcgctttttccgcaatgccattctcctctccgttcttcttccgctgttccaaaacggcgtcgtttcgctaacttctctgggttccgtcttgcttcaagtcaaaccgtgaattcggttccggtgagtgttcttttctgcggatcaaagcgtcgtcgttacgctaccgtgtccctttttagcttttttttcttcttgttaaagatacggttgcgttttaacgttttcagcgtgggaatggaacttacaccgtttcggatttcatgacaaagaagcaagatttgcatgttgtcaaaacctccaccaccgttgatgaaggtaccccaatggtgtatacaattttattatgtgattactttatttatttatttatcattaataatattttttttggattttagctttggaggctcttgtaaacaacagaatcagtggtcttccggtgatcgatgagaactggaatctggtgattgtttatttcccttcacatttctttttgctttattatgaaacttttatgatttatttttaaaaaaaatatttggtttttattttgagctggattcagttcctcattggatttttttttggtgatgcaggttggagttgtttctgattatgacttattggctattgattcgatatcaggtaaaaattcgaaataccttaagttagtaaagtttcttttaactaccattctaccaagtcaaatcaatgttcatgtaggttgatgggaatgattatggattaatttttcttcttcttttgtgctgtaattgacttgttgctgagagattgaagataccatatgtcttatgcccttgctttttttagagagacagtagtttctgttttggtaggtgaggaatgaggccaatggtatttcaaattatgtggagttttgggagtttcggtttggtttattttaaaatattttttattttagaaaatcaagaaaacattaattcttttgtccaatagctcccttacttattggtatcttatccaaatatttaatatttaattaagaggagagttagcaatacactccttctaacatattctctactattgattaaaatatattggaagctacaaaatcatgagagactcgttaaataagaagtgggacctataaaaagtttgtttccaataaattttggccaatagtaaaatgtgttgctagcatttctctttaattaattagcaactatgcaatgattagggtattttagtcaaagaagactattttatcatagtaagtggtgcaactaataattttcttatgatgcgtgcattaaccttaattgacaaataatttcaaatgaagagtgtttaactttattgcctagtcatactgaaattccattgatgtgcttaatcaattgaaacaagttctctacatgctgcttttaggaggttctcaaagtgatgcaaacttgttccccgatgtcaatagtacttggaaagtaagtgtaaccattttatgttccgctttagggtgtgagcttttattaacattatcatgtactatatgaattctagtagggtcagtttgtttaagcttattaatataaacacttttttttaataaaataagcagatttttatttttctgatgtgtttggctaaactgcttttacttaaaataagtagttttctgctttttttaataagcaaatcctattttaaagtgttttttttttaaatcaattattttaaagttattttcttttaagtttaaacaaactcaccctacatggaatagatttattgtttactggtaattgcaaataactcctcaaccgatgccatgagatgctaattctatatgatgaatgataatgttcacaaactaaagtttggacttagtttctagtgcaatactcagtttttaattaataattcatctgcttctacacacaatcatttacaaacataagtgggctcacttttcatttgacagcattgacttgctggctaaatatagtgatgatacgtggatgattggatacataaatacttgagaccaaacctctctgttttacatttcctttttttagcagcttatatgtatattttgtttagagttgggggtgtgttttgttagatttcatttttcaccaaaattaattggtatttgctagaatagaccctcatcccctttaaaacattatttgaatacttaaaacttttttttcattatgtttgcttgcttaaatttcctgaaccttcagtcagtacatgttgactttaattgcatcaactgtttcatgatttagaactagatcatatttctcgaaaaaatgtgaagatttcaaagggaaactggtaacgttgatgtaccatggttaatacagaatgtctagtttcaactaatgcacttccttgttccccagtcttataggatagaggaaaaattgctttgtgaagtattatctggatgtctacatccctgtgtattcaaatttagtatgccagagtcaaccttcaagcagctatgatctgctaatatgatgctgtagtgtagaaaacttctgtttgatcatgttgcaaaagtctgctaattgaggagttctaatattgtattatagacccccctcccccccccccccccccnnnnnnnnnnnnnnnnnnnnnnnnnnnnnngtatgatagacccattattaacaaaggtaatagaagcctagaaggggaacaagagaagaaaataagcaaagggatgagtttgctgtatcagcccaatctgaggagaacaatgggccagaaagagtgagcccacaagtatgtgtgagagggaaaggaaggcatagcaacagtgacagaaaattgttagaggaacagttaaatgggtgaataacagaaaggatagttggatattggagagtggaggtaagatggggaatcatttccttgtagtgaagaggtaggggtcaatgggaggaggtagtggtggaaaggctttgccatggtgtgggtttgcttctttgtagagaaagcaattaggtgtccatattcaagtcagcattattgtaatgagttttccttcatttaattttatagtaaaactataaaatacagtttctcttcttcatccctgttactgattttattatctgtcgagcatttattatctatgttccagacaatccctttttagttctttttcttttcttttcttccccttcttcttttatccttcttttttttaccttatttatttattttttatattttttaaacttcctcgtatctatcattggattcatctaccaccgaccccaattaacttgggttaacggtgttgttgatgatgttgatgttggtttgcaagatgtaatgaatctgttattgcagatgaacctcaaatactcacgatgttggttgtcaatgaaatcaattttttcctgtttggtaaaggatatgtgcaggttgagcatttgggaaatacaaacatctaaccattatttttaataatccttttgctccttcttttcttcactcaccctcagagaagggaaattgtatgtattgtttacggagctattgattggctacacatctgtatttgtaactattgtcttgtatgacagacattcaatgagttacaaaagctgcttagtaagactaatggccaagttgttggtgacttgatgactccaactccacttgttgttcatgaatcgactagtcttgaggaagctgctaggtactgacattgcatacatgtccaatattgttgagttctctgattattttgttaccaacacagtcataactgccaattcataccaatgtacgaggacaaaaaacatcactgttgatttattgctctacatcagtgcaaccatttatgttacatgtttccatggaatttaaattatattaaataagattcctaaatctgacaaccatcacaatttagcattctagcttgcaaccatagaccacttgatgcctgacaccattatcttcttgtattaggctgttacttgaaacaaaatatcgtcgactacctgtggtagatgatgatggaaagctggtaaggagtttatttattccctattgtgagtttaattttgtgcttcttcaagtagtgacttttgctcatagatttttctcatattcttgctaggttggacttattacacggggaaatattgttaaggcagctctactatcaaaacgtgctggagagtggtgatagtgtttgtgaaaagttattcaaatagatttgcttgcaggttgcgctgacgacggtcagcctaacctctgtattattagctacggataatgttaatgtatgtagttatacctagtatatatttagactattacaaatgtatatggcaggccaaaggaggagctgaaggcaacttttgatggccttgtgagatcttagtggtggataaaaaaccatagagggaagtgatttatcgatcacctttattaagtgatcaaacattgtgtcggtgcattggattatttgtttcaatataggagatactaaatcctgttctttattcagtctctgataactgacatttatgaggtcagaatagaatagatcatttggagccctttattatgaactcaatattttaaattgcttaggattttaattatatgtaattatgttctggttttgttgaagaattggattattcacgaacttgtcgagtcttgtcctcatatttaccagtttactgtcaaattgaatatctcttactgttataggcagggtcaaggtcgagagatcccataacgaattgacacattttcttaattattaggtgtacacttggaaatacaggggattgggaactattttatcgtaatcgatctctctattttattttttatattcactttgtcaaccataaactaatattgaatcattgctacagacgtgggcaaaaaatattagtacttcaaattccgattaaaaattgcgcaaggatataaaagaatacctagtagtcgcaatttgcaaacaagaaaaatctagtgagattctacatttcagtaaataaaagaacatatacatgttagtcaaatgaatacgtaggtctttcatagtcccaaatggctgaccctggtccttatgctatacaaatccttcctctacgttaaagtgtgaatgaccaatttgggagttttattaactatttacaactaatcactggcttgcagttatattctagagtaaccatccttcattcttccacaccacacgttatggtttatctatttcgtttgacaagtctaaccaatcacagcgattggaaactccagtagaacaccacaagtcaaatagactcggttagcactttgcttgtaatatgtcactcatgacgttttagctacaaacttttctagttgtggaatctacgagcccaccatctatcttcataggaaaaatcaataaatagaagctcccactggttcattaagccacatctccctcaccttgcaaaattctctgagttgattcgctattttcttgtagtaaacgtagcaagcaagcatatccatttcaacatggccctcaaaactggttcagttgaaatgttcttcttccccttcgtaggaggaggccatcagattccaatgatagacacagcaagagtgttcgcatctcacggagccaaatcaaccattctagccacaccctccaacgctctaaacttccaaaactcaatcacgcgcgaccaacaatccggtctttccatctccattcacaccttctccgccgacatacccgacacagacatgtctgccggtcccttcatcgacacctcggccctcctcgaacctcttcgtcagctcctcatccaacgccccccggactgcattgttgtcgacatgttccaccgctgggccggcgatgtcgtttatgagctcgggatcccaagaatagtcttcaccggcaatgggtgcttcgcacgctgcgtccacgacaacgtaagacatgttgcccttgagagtctcggttcagactcggagcctttcgttgtccccaatctgcccgacaggatcgaaatgacgttgtctcagcttccggtttttctcagaactccttctcagtttcctgatagggtgaggcaggtagaggagaagagtttcggaactgttgtcaacagcttccatgacttggaacctgcttatgctgaacaagtgaaaaacaagtgggggaagaaggcgtggattgtaggaccagtgtccctttgcaacagaactgcagaagataaaaccgagagagggaagctacccactattgatgaggaaaaatgcttgaattggttgaattctaagaaaccaaattcagttctttatgtcagctttggaagcctggctcggttaccctctgaacagttaaaggaaattgcttatggtcttgaagcttctgaacaatcgttcatttgggtggtgaggaatatccataacaacccatcagaaaacaaagaaaatgggaacggaaactttcttccggaagggtttgagcagagaatgaaggaaacgggtaaagggttggttcttagaggttgggctcctcagttattgattttggagcatgttgcaatcaaagggtttatgacacattgtggatggaactcctttttggaaagtgtgtgtgcgggagtgcctatgattacgtggcctctatcggccgagcaattttcgaatgagaagttgataactgaggttttgaagattggtgttcaagtggggagcagggagtggttgccgtggaattcagaatggaaagatttggtgggaagagagaaggtggaatccgcagtgaggaagttgatggtggagagtgaagaggcagatgaaatgacaacaagagtcaaagacattgcagagaaagctagaagagctgtggaagaaggaggaacatcttacgctgatgctgaggtgttgattcaggagcttaaaactcgtagattggcaagacaagattaaatttttacataagagaagaaagaattcagttctaaagtacgcataaaaaacacaagaaaaggagcttgttactttcctgcaccacttgaaatcatagttctaaattgcagtcagcaaccacaattttggtcgcaatatcgttgttgcgaagccgtctgctaccgtaacagcccacaattgcaatgcgaatttcaatcccatgaaatgctcaacgtagccgaaacagaatctcagtattgttctatacttctattccactctttttttgttaaaagacaagtttagatttcaatattctattatagcttctaagtgtcaatgatcaaaaagggtgtgaccgtatgagatgttaggagatactaaattttaaatgaatgataaattatactatcttataaataaaagatacaacaatattagaataattgtgaaattcttttttatgttatgtgcaaacatataataacttcacgctgtaaagactgcaattcgcatatcagtagctgcaatgcccacagttgcaatgatcgtaaccgctattgcaaccacaacaacaatttataatgccagacgcctagatctatgcatacaacaagggcacattaaatataagtgaacacatatattctgagtatctagaaaagcatgcctcttttcaatatttgggaaaaaattaacatttttttttacattttttggttcttcctctaaaacctaaattcgaagttttactttatcctttttataaatactatcaatctagtacctaatacatcaagtactactactaagttggccagcactaacacattaccttaacaactatgcaacaacgcttctgttgggtctccagaagttgtcaaactcttggtttttgctctcgcagatgtgaatgccatgatcatcgcatacacaagcaaaagggtaagtatacctgataaagtatgtagctaggctgaggggacacttgacacattcaaattgaacacactccttggtcacgtatccacatatgctgaactatatgtctcagccttcaacatgtgcgagaaaagagcaacactggattgtgattatcgtcactaaacccacttaagggtgatcacttgattggaagtgtctaagtatgattaggagaagtattactcaacaattaatcatgatgtgacacacccatagaccccaaacccaataaggttagtataaaaggggtgaacccccaggtaaatgaatgattcattctcaccaactcactacatatcattaataactttgagtcaaatcttcacttaaacgttagagtgccttttgcaggtaccctttcctctgcaatgacggattctcatgcactcgagacctcgatgaggaacaacaaatagacggtcctttgatacactaaaggatccttcgacagaaagacagatacccattccatttgtgacatgaacaataacttacatgtaaacgtacatccatgatgaacatacttcatgagtatgttcatatggaatccttatttcatattgcattattcacaaactaattcatacttaccaatttactaccgaattgaatatctctttgacaaggccaagagatcccatcacgaattgacagacactttttttattagtatatcattggaaatatagggaagggaataaatttgatgatatatgatttctatatattttattttttctatttactttgaacttgaagtagtgtcaaccattaactaatattaaatcatttcaaattccgacaaaaatatgttataagggtataaaatttgaaacaaatctgtatcccatgatttgtgattcaagattaagatagattttaaatttcagataatgtgggcaacataataatgctgttaagtgttaacatgcttgaggtggtggtcctaaatcatataataatttaccgtcaaacacccatgcagaaagagtgtataaactaaaacaaattataatatgcataaatctaggtgctcctatgctgagagaagaccgtccaagtaaaggtcttgcttcatatacaagaaaagaattaacaataatgacagcatatgctttgagttttacttccacacatgatatgtcgatttcgtttgacggtcgaactccacaagacaaatacacttggaattttgcttgtaatatgtcacgcatgacgttttaactacaacctttttattgttgtggaatctacgagcccaccatctatcttcagaggaaaatcaataaatagaatacgtgccaacatagttgaatctctttatcatttcttagtttacctttccaaaaagaaaaaaagaagctggatgcgatgggtgttagtaaatttttgttttaataatttaaaatttataaaatattatttatactaattttgtttttataaagtaaaatatttgagtttttttactactacataaggggggtttgcacgtatatatatatatatccttctttagccaacagacataagaagaaaattatttttgcattttcctctaaatttcttctctagtgttcttataaaaaattactttttgagagaaagaacatggtattcataaggttcggagatctattcgctatacaagatcgaaaataacgggttgtcatatcttgggagaggagtgcaatcagattctcttatcagtgcagtgggagcgttttctctctaaagatagcgtttgcacacttcaacccaaactattgaaaacttctcctttaaaattattttcctttatgcttattgtatgttatattgcattgttaacctatgttctgtcatattctaagttgtattgctactgttattcttttatttagtttgagactttgcatcttcttctcatttattttatttcattttctaatagttttagagagaaaaattctactttcttcttgcaaagtcttttctgcagtagcattatgttatatcaaaatgtctgtcatggatatgattaagtccctttctagtaagcctgaaaaatttacgggtgaaaaccttttctattggcaacaacaaatgaaattctggtttactgaattggatttatactctgtggtttttaaaagagaaataaaaatttcaacttcctctactgatatagttcaaactaatgttatcaaatcttccaccactaagcatgatgtttctgataaagatattttatgtcatggacgcattttaagtgctttgcctgataacatatggatatgttgttgatttatgggaagcattctttgccatactaaaacttttgttgatttatgtgaagcacttgaattgaaatatggatctgctgaaaaaggtttaagccgatactcttgtgaaaaaatgattgagtttcaaatagttgatggaaaatctattttagatcagatccatgaatttgaaaacattgtttatgacattgacgcattttttgccatactaaaacttctgttgatttctaggaagcacaattgaaatatgaatctgctgaaagaggtttaagcctttatctaagtccttcaagaaacatgggtttaacaaaaataagttggtagaaagccttcttttactaaaaaaaagaacaatgcttttaataacaacaataagcctaaggataaaaatatggggaatgaagttttttgctttgtttgtgggcgagctaatcattcggccaagaattgttttcaacgccatcgccaacctatgtctttccctaaacctcatgctaatattgttaccattggtcctgcctctaattccccatctgataggtaccatgtcactagtcctgagttaaattgtgttgttaactaaaatgattggtttatagactctgaggctaatgttcatgtgtgtgctgataaaaaatattttctttatatgaggaatcaagaacacgtattgtgagcatggggaatgaaagtatgagacatgtgttaggagaaggtcaagtgaagctagagttatcttcagggaatttcctttttttagataaagtctatcacgttttttatattaggaaaattttgataagtacttctttgttagtccaacaagggtacaacgttatttttaagtccaatagagttgttattactagacattgtgtttttattgggaaaggctacattgtgattatctgtttaagttaagtcttatgccttgtttttattaataaaatatctatcatatcttcgtttgttgcaaatgttgaatgttcttatatgtggcatgctagacttggacatgtgaatttgaattctatcaaaagaatgatgtctcttaatcttattcctaaagcttctattgatttaaaacaaaatgtgaaacatgtattcaagcaaagcaacctagaaagggtttcactacatgtattgaaagagaaactaacttgcttgaattggttcatagtgatgtatgtgatagtaatgatgtgttaacacgtggtggtaagagataatttattacttttattgatgatttctccaaatattgctatgtgtatttagttaatcacaaaagtgagttgtttgatgagttcaaggtatataaaacagaagtagaaaatcaattagaaagaaaaattaaaattctacgttctgatagaggtagagaacacacatctttagatatgagtaatttttgtgaaatgcatgatattattcatgaagtgacacctccgtatgctcctcaatgtaatggtattgcagagagaaagaattgtaccttgcttgatatggtgaatgctatgcttgtaagttttggtttgcctaaaaatatgtggggtgaaactttatattttgcacatcatattcttaatagggttccttataatttttttggaaaaactgcttatgagttatggagaaaaagagaaccaaatctgaaataccttaaagtgtgggggtgtcttgcaaaggttaacatccctattaataagaaaagaaaaattggaccacaaactgttgattgtgtttttgttggatattaaatgtgtaataccttgaatttttaagcatgagattaagccttgtaactaggaaacataatcttgcattagaaatcccaaaaggaagcttgagaaaaggtaagaggcagattcggccatctcgcgcgatccgcgtggggtctggcgcgatccgcacgggaggctcgagtcaggacagtgttttcggccatctcgtgcaatccgcgtggggtatggcgccaaccgcgtgggaggttcgaacatatggcacgatcaacgtggctatggcgcgatcagcgtgggaagttcgaatcagagctgtgatttcgaacatatgacgcgatccgcgtgggatatggcgcgatccgcgtgggactttcggtcagccttatatgtagatcattctggacgaaaattaggagagagaaaaggcttattcttccttctccagccctaacctccattagagactggtccaagcttactagggccctatttcttgctttaaataccttcctttagcctttgattgtgagaaaaatactttggaagcttgaatcattcaattgttctcttgaaaaacctcttttgagtgagttttggaatctccagagaaaagctcagagaacttgacagtggctgagacccactgcgtggaaaggacaccagagctcgaggaggttgtccttgggtcttctttgtcacctttgaggtaagaaactcaagtttctctgtttgattttgattttgggggttctcatgaatagtgacccatatgagctggggctagaattagcccagggtcctgtagagaattgtgttcagggggttgttttgatgaagttagagccttcagaaatcattattgatgaagtttgattttgactctgaactatacatgcatagagaaagggttggatgtatgactattttgaaccttagagcagatgataaagttgctcatgggatagtgtagaggttgtttatgagctgaattggttgcattataagcttggatttgataaggctaaagtaaggatatgctttgtgttagcctgaatagagtcttaggagagactctggagccttggttaggctaagagggatcctattgagggtctgagaatcacttgtgaagtgattagttaggtgttacgtggaaaggattatagtttcctttcgttctaacggcttaggactgttactgatacgttatgtgttgctcttatgtaggacgtgagcttgatatttctggtggtggtgaccacgagaccgggggagccggtgttttgcttaaagcaggtaagctcttggtctttgtatgtgtgtcctttattgtgttccaccatgctcttaatggagtgatggttctgttgggaatacctgcatgtatatggaaattgtatattgtgtgattaattgttgaattgatgtgtatggaaatgagatgcttgaaatgtgatttgaaccctgtgatgggggaatgattggtgttgatttgagatgcgtggaatggaatgtgaaactatgatatgcatgatggactagtagacttgattgtgaattctgtgaatgaatacaatcctatggtagtaggatagatgacatgaaattgagtaagacctgatgtgagatgttcctgtgatatagatgtagcctcccgaatagagatgttcctatatacacagatgtagcctcctcaggcaattgagttgagatagattatgagatattcctgttatatagatgtagcctcctaaagtggagatgttcctatatatacagatgtagcctcatatagattgttaagatcctggcatgagatgttcctagtatatagatgtagcctcctaagtggagatgttcctatatacctagatgtagcctttgcaggttagtgatttatgctatgaacggttgtaggtcgtgcttggggcacctgattattgacaggtgaatgtgaattgagatttctggctgcttgatgtttgtctgaatgatgttctggtattgaatatgagaatgactgttttagatatactatttctatgtatatgtttggaagtgaaacaggggaaggaaataccttcaagggccctgagtttactgggattttatatctcaccccttttgtgggacttatattcttgcaagtgattccttaggaggagcagatagatcccaaggcaagaagcttatgcagggataactgttatttgtaaacattaggcctagatgacatgagcttgtggctctgatgttttgtatattgcctttggttttattttgtaccctgaggggagatatatgtacagtttgtacttaaacatagactttatgtatattcaccatattatagtgtaaatggttatgttagtgacatttgataacgtcattcttgtgttgtgcttccaaactgcttaaactctgatgattatagttaatgatagtgattaaggcaggttaatgaccctggtgttttacggggcgttacaaaatgcacaatactacttataaattcttgattgttaattcttaagtgttcgaaatttctaatcatactattatggaatctagagatgccactttctttgaaaatttgtttcctttgcaaataaattgtctaaacctatgtttgatacttcttgttctaatttaccattttgtagtaatgctaataaggacattgtttttaacctaggaagagtaaaaggcttaaaaaagctaaagattttttgttctaaattttgttcgtttctacttgaagatgatcctaaaacttacggtgaggccatgaggtctattgatgcacctttttggaaagaatctattaatgatgaaatgagttctcttaaaactaataaaacttggtttctaactgatctcccccctggttgtaaaagtacaggttgtaaatgggtttttcgtaagaaactaaaaaccgatggatctatagaaaaagttaaggcaagacttgttgtgattggctgtaaacaagtagaaggtgtagatttctttgatacatattctcctatttctaaagttactattattagagttttaattgcacttgcttgtgtttttaatttggaaattcatcaaatggatgtaaaactgctttttaagtagtgatttagaagaaatttgtatgagccaacctgaaggttttgtagatccgggtaaagaaaagagagtttgcaaacttgttaaatctttatatggtttgaaacaagctccaaagcagtggcatgaaaagtttgatcaagttgtcctttcatatggttttcaaatcaataatagtgataaatgtgtgcatgtgaaacaatttgatgatagtggatgcgtcattttatgtttgtatgtggatgacatattgatgtttggtagtaatatgcatttcataaatgatgtgaagtttttcttgtgtactatttttgatatgaaagacctatgtcatgtagatgtgattttgggtattaagcttataaagaaagatgatgacatcgttttaacccaatcacattatgttgaaaagctattgaagaagttgaattattttgatgtgaaacctgtttctttgccttatgactcatccattaagttaaagaaaaatttgagtaaagaagtttcttctcataaaaattctcaaattattggttcaaactatatgaagtggattttgggtgggggaaatcgatatggtgtagcactagtgggtgccccacgaggaataacataattttgatggataccagagatgaggatgagattgaagcacttgtgaacatggaagagcaagacatgggcaagtttgagcgtgacatgcagcttcttcaagtgtgtttggattgtagtttgtaaatttaggttgagttgaattttcctatgcaaacttaagttttattaaaagtaagttaagtgtaacttaatttatgtttgaatttaatgtgataaatttcatgttttaaattaataaaaagtggtttaaaattgtgtgtcaaaataaaaagataaccattattttgaaagaattattttgatttagttttaaaacataaaaagtaaattaaattatttaaaagataaatgactaaaatttaattgaaaatataaaagagtaaaagtgtattacaatttcttaaattttgtatataaataattagtataaaaaatatgcataaaagatggcacatgaagtaaattatgtcttgtcattaatatgaggtgaatcttaacttttttaagtgagtatttttttttttacctttccatcttttcttttacatacaaatacttatatattaagtaaaatatannnnnnnnnnnnnnnnnnnnnnnnnnnnnnnnnnnnnnnnnnnnnnnnnnnnnnnnnnnnnnnnnnnnnnnnnnnnnnnnnnnnnnnnnnnnnnnnnnnnnnnnnnnnnnnnnnnnnnnnnnnnnnnnnnnnnnnnnnnnnnnnnnnnttgaatttaaaaacaattttatttaatgatttaatatcaataattctaatttaatataattaagttgagtaaaatttattagatttgatcaactactatagaaattactaagtatctcaatcaaccgcagtgatatattttaagtctcctttacatataaatgtagataaatagattgacttaaatatattaaaaattaaaatgtgtagtttaaatactccttatttatttaacattacttatgattttataatttttaataaattttaaataataacaataatatgtaaaaaaaattgtgttannnnnnnnnntgaagtaaattatgtcttgtcattaatatgaggtgaatcttaacttttttaagtgagtattttattgttacctttccatcttttcttttacatacaaatacttatatattaagtaaaatataaatataatttatgcatatatacttataacgctcatgttatgatcaaatgtatattattatattaattaacattaatatagtattataatatttataataaattttatatgtcacaagtactaaaactttcactatcaaacatatgatctttaataatattttttttgtctaatacttagtaaaaatgttactaatatgttttaacaacattttatcaaatggtgagtatatagtccatgtcacaacattttgattcaaaacatgttcatattagtttacaaagaagaagagcattgatacatttgggaagggggataatcaaaagactatggactaatatagaatcaagtcaccctaacaatagagtgaacaacttaattcgtttgtctacaaatgaaactcattgaagagttttaaatgcttcctagtttctatttacatttatctatgatgagccctgattttgagttattgttgttgtgtgcttgaagcaaattgaaaatgtgtttagagtcaatctcaaaggtaatgttgctaagacaattgcttttgcccacgcaatagcttctaatttcaaagctaaatccttagcttctacttatatttataaaagtaaggaaaacgcatcaaatgtgaactgaaatttaattagaacataaaatccttatttgtgataccggtaagtttttttaaaattatttaatttaatttttggtgatcttatttattagaactatagggagcatttggtagaaggaatgatttagctcatagtgtaactcaaatttgatatgaatctttatttttagcttgaaattgaatcgattcaaattcacaaacatcttgattttgctcgtcagttgacttcatttaaaattataattatttttcatttttattaatagggaaattatgtattttacatattttatttatttattgcataaaatattaaattagctaaaataattatatagactcaataatataaaatatttaatgtgtgtgtgtatacatatcaagctagttcatgaaccaatcaaatcgagctatatgtagttaagttcaactcatttatttaatgaacacaacttttaacttaagttcaacttatttagttcatgaaacgaagttcaatgagtcaattgtcgagttgagtctcgaatatagttagagtttattcaatttattgtcacccctaatttcatgtttcaacaaataatggtacacaaaggttagtcgaaaccaagaaaggtatttatggaaattttacatgataattttgtcaatatgaaattattgactgcacacacatgttatatagattatttaacaatttaattgatgtttaatctttgttggaatttcaaacttactttaagtctcaaattaaactcaagacatattccccactcactatgtgatacccttttttttaatgtaaaatggactaatatcatttcatgaagaagaagaacattgatacattggggtataatcataagactatggattagtatagaatcgagtcaccctaataagagagtgagtgacttaatttgcttgtctacaaatgaaattattgaagagttttgaatgtttctaagtttttgtttacatgtatctatgatgagtcctaattctgagttattgttgatgtgtgcttgaagcaaattgaaagcatatttacattcaatcacaaaggtaacattgttgagatcatttttctacccatgagatagcttttaagggcatctttaatgggatttctaaagctattcaccgaatttatcactattcttgctcaagaattcttcatactggaggttgggttctagaaaaagaactcccaataactttttttatataaaaaaataatattttttaatgtctctattcctaactatttttttatataagtaaattcaaattggattctatccctaaaaaaaatgacaatttttttttttacattctgtgtttgatatcacaatactcataaaaaataatcaaagaattgaatcgatattctgtaagtcttaaataaatcggaggatttcccctttgagatctaactagataagaagtattttcagaagcaataaactgagaggctttggcagaattgatcgaacttcttgctttcagggtgcctcgcttgagctcaacaataaattctttgaataaagattctattctctaataagactagagcttcaacttctacttatatttataaacgtaaggcaaactcatcaaattttgagtgaactttaattagagcataaaatccttatttgtgatgtcggtaagttttttattttaaattattttatttgattggtgattttatttattagcatgtagaaagcatgtaaggtggcgtaattggtagcggaaaagttaattcgttctcaattcccgagaaactagaatcctggaaatgatagttttttaaatcattaaaataggtttgattagtattaatatgtttattaaaaataattactataatcattttagataattaaaacttcccctcaattcgggaaagtttccaattttccttatggaaattttttatgcaagagtaaactaaaattgatttctaaaaaatatagttttttagacaacctcttttttaataaatacatactaaacacgacaaccttagtttcttaatttaaaattactaggaaagtgattttccttttataaaaaactctctaatattagtgacaaatttaaaaagtttaaaatatggagctttcaaaatcgtcgtcattaaattaatttcataaaatataaaatatcttctaacaaagatattcatctttgtaaagaatttaaataaagacatttttttaaaagtatagaatatcgtattcatcttcaccaaaaaacatttttttttgaaaaaatcaatttaagtacctttacacaaacactcaatcacattccttggtcacctcattgagtagttttttaattaagtataaaaaaaacgtaaataaatttctccacgccttgcacgttttgagttttgctctcattgttgtaacatagctgcctcttccgtaacgattcaggctgcctccaccattccgaatcatccaatttcctttgcctgcctgtttgacacgtatctatttttctcctttgaagtaaccaacacaaatgtttatatattcttttatttaaattattacaaactcgaggatcgcgtggcctatagatccatcaatattcaaatacatgtaatatgtaacagaaaaaaagtacattaatttaatacttacccgtgcaaaacgcggcttccaccatatccagtgagattgctcctttttataaccagaacaagttccttgtacccaaatcatccttctaaagctagtaagtactaagtagtaacccactatcgtttctctctaacagcaaaagagttctaacctcaccaaacccacacactaccatgggtaatgagaatcgcgagcttcacgtattcttctttcccttcccagcaaatggccacataataccaaacattgacttagccagagtctttgcttcaagaggaatcaaaaccaccgtagtcaccactcccctcaacgtgccactcatttcaagaaccataggaaaagccaacatcaaaatcaaaacaatcaagtttccttctcctgaggaaactgggttgcccgaaggttgtgaaaattccgattctgccctcacccctgacttgatcatgaagttcctgaaggccaccgtgctcctgcgggacccactggagaatcttattcaacaagaacatcctgactgtgtgattgccgacatgttctacccctgggcgacagactctgccgccaaattcggcattccgaggatcgtgttccatgggatggggttctttccgacatgcgtgtcggcgtgcgtgcggacatacaagccacaggacaacgtctcctcgtggtccgaacccttcaaggttccggagcttccgggggagatcaccataaccaagatgcagctcccccagacaccgcaacacgacgaggttttcacaaagcttctagacgaggtcaatgcttcggagctcaagagccacggcgtgatcgccaacagcttctacgagctcgaaccggtttacgctgatttttaccggaaggagctcgggagaagagcgtggcatttgggaccggtttgtttgagcaatagggataccgaggaaaaagcatgcagaggaagagaagctgctattgatgaacacgagtgtctgaagtggcttgactcaaaggaaccaaattcagttgtgtatttgtgttttggtagcatgacaacgttctccgacgcgcaactccaagaaatcgcattaggtttggaggcttcagggcagaatttcatatgggttgtcaaaaaagggttgaatgaaaaattggattggttaccagaagggtttgaggatagagttttaggtcaaggaaagggtttgatcataagaggttgggcaccccaagtgatgattttggaccatgaatccgttggagggtttgttacacattgtgggtggaactcagtattggagggagtgtgtgcaggggtgccaatggtgacatggccaatgtacgcagagcaattttacaatgctaagtttttgacggacatagttaagattggggtgggtgttggcgttcaaacgtggattgggatgatgggaagggaccctgtgaagaaggaaccggttgagaaggctgtgaggaggatcatggttggagaggaggcagaggaaatgaggaacagagcaaaggagcttgctcgaatggcaaagcgtgctatggaggaaggaggatcttcttacaacgatttcaactctttgatccaggatttgaggtcgcgtgcttgttgatgattcatgtgtcatgtatgcatgtagaattagaacggtttgtgggcaatgtgatgatcgatttgctaataatacccgcggaagttgcctaaacatttttttttaatatgtttttggttcacttaagtttgtgggttttaaattttgatttttatatatttattttattcatgttattttaattttcatttttgtaagttttttctgttttaatctcgataagttttttgtttttttaatattaactctcaattagaattggaaaaatgcggatcaaaattaaaaaatcaagaacttacaagtattaaaagtaataaaacaaattattgggttaaaattaaaaaaaaacttaaacttatcgaaacttaaaaaaaattataggaaccaaaattaaaaaataataataaatttataaaaactaaaaatatatttaattttttttctatacggctatatctttatataaaatttacttaatctttatctaatttttagtggtataattctaaaaatttgttaaaagaacctcaaaatttatcttgcatatttaattcttaatttnnnnnnnnnnnnnnnnnnnnnaaataacatagttttaaaaatttaaatgagatgaattataattttcatttaatttactcttacactatcacttgtcattacaaaatatcattgtctcgtattaaacttatatgaatatttttattacttactttaatcttaactagaattttagtccgtgtgataattattattataattcatattaattaagtattttaaaattttaaataatgttattactaaaattaataataatattttttaaaaaaaagtccttaacaaataattttttaaaatatataattattttagtttaaaataaataatttaaacatgatataatgttatttttaaattaaaacaaatgggtgattaataaattagagattttttgcccaattatagaaaaaaatgtgtgaaatgcacctgctaaagatatagaaagagagtcttagaaatctctagttaagtgattgagagagtgaacgttttattatccaagttaagttttaatttatagtatagaaatagacttttataatttannnnnnnnnnttaaagaaatatactatgtaatgataattataacttttcaaattggaaaaactagacaagccaaaactagacaagtcagaaaacaaaaagaaatattagacattaatctgtaaaggttaaagatatttttgattatttctaaattttttgaaaattttatttttagttttcaaataattttttcccattttggtctctattctttgcttgaaattttagggtcaaacgaattttatttgctaaactatattgttaatcttttatcaactaatttaatgtcatcaattggtataaataaatagaaaattaaaaacatagtttcgaaaaagaaaaaatacatgtgactactccagtgagttttttttgtgatgaaaaagtcattcgacaactacttagtattaaatcataaattaatgttgttaattactaatagaaactaaatatgttaacaaagaatataaaaaattaaacaaaactggtaatttttttttgaacgactaatagtaaaatttgtaaacatttaaataccaaaaaaacataatcaaccccaatttttattatcgattgtaatacaattaatacatttttctctcaaccctttaattctatttttagaggactattcatcactcacatgataatattttgttcagctaagatgctagggatgaaaaaatgagtttggtcggatggataagttatttaacccactaaaaaaagtgggatgaactagcattgctagtccactttataaagtagattagtctaactcattctatttttttgtggattaggaccagacctatttttggtggactcatccactttgctattttcatatgttcaaagggatgaaaaaatggatttgatccagtgggtcaacccatttagtccactaaaaaaagtgagacaaattagcattgtaagctcactttacaaagtgggtcagtctagtccatcctatttttttttgtagattagaaccaacccggtccattttttgcagacccactttatcattcatttgaggtgcgggagagacatcccaagtcttgatttaaaggatccaaatttgagtaagaagatcctccttcttccaccgcctttcaaaccattttcaccaacactcttgctctgtttctcattccctctgtttcttcctttgccaataccattttcacagccttctcatacaaccctccaccccaaaataacttctaaagagtgagtcagcccatttagtacagtaaaaaaagtggaacaaattaggattgttagtccactttgtaaactggataagtgcggtccatccggtccatcccttttttttggactaggtccacaaaacaaatgtttaggttcgcgaaactctgtgacagttccaaaacacacgtaaacaactgaattagttgttttcgtgttcggccactttaagcactcgtgctcatcaatagacgcttcttttcctctacatatattttcctccttattcctattgcatagggacaaagggcctatatgccatgcttttcttccaattacgttcctgttatgatctgcataatccttctcaagttcgtagaagctgttaacaaccaccccatagctcctatcatctgattcctccgcttccttccaaaaactgttatggccctcgttatctttcgtaaggaaatttcccacctgcaatgagtaattatatgaaataatgctgtaatgccatagtaattttttcataatgagtaaaataaaaaaagtctatttgcatgtttcttttttgatttattttaatattatgtattcaataaaaaattacccactttaatgaagaattcaatatagcttaagaataaaaataaatattgatgcatttaattgatgtaataaatatatctagaagaacgaccgagaattcagttaaaaaaggctcaaccctttatggtcgatcgacactaccgaccgaagaatcggacataaagctcctgatcacatacatatctaggattgtaataatttatatataataaatttatcatataatttttaataattttttattaaatgatgatataaaattattatatattatcatgttattgcctaaccattttctcttattctctctaatttttttttagaatcagtactaatgtattagcatttaatgctattaatataatagtttgtaaatatataattaaatggaatttttcttatatagtatgatagagttttcatatataagtagaatatatagaaattgaaaattatatatatataatgataataagaatttatctcctaattcatatgcttagttattattattataaataaataattataaattattttttaattttctaaacattaattttttattcaacatattttaaagtagccaaatcctaatgcatattaataaaagttttaaattattttgttgacacaataattttaaaactattaaaggctgagttatatgttaacacttaatttcagtacatgagtttttactaaatattgaatttttattttatgcaagtaatatagtaagttgaattttatgtctacatataattaaattaaaaatttaaattgtaaatgttatcatttttggggtactacattgagggtgcgtgggtctctagctcattgcttctcttattattctcttctctttctccttaaagaatgtgttggatatcccaacattttgagtcttggccaaaacaataaaataagccccttacgtataaaagtattctaaaatataaacatagcttatataaaaaattagaacatataatttcactaaaaaaatatatgctttattaattaagcaaataacatagttttaaaaatttaaatgagatgaattataattttcatttaatttactcttacactatcacttgtcattacaaaatatcattgtctcgtattaaacttatatgaatatttttattacttactttaatcttaactagaattttagtccgtgtgataattattattataattcatattaattaagtattttaaaattttaaataatgttattactaaaattaataataatattttttaaaaaaaagtccttaacaaataattttttaaaatatataattattttagtttaaaataaataatttaaacatgatataatgttatttttaaattaaaacaaatgggtgattaataaattagagattttttgcccaattatagaaaaaaatgtgtgaaatgcacctgctaaagatatagaaagagagtcttagaaatctctagttaagtgattgagagagtgaacgttttattatccaagttaagttttaatttatagtatagaaatagacttttataatttannnnnnnnnntgaagggatcaggttctatctaggataataatttaaattaaataattaataatattaaaattcaaaataatataaataatttacttatataaattataaaatataaatttaatagacgtgtaatgcacgagacaataagctagttatatgaaataatattgtaatatgtattatactttattatttaaacaaatattccatagtattttttaaatcataattacatagcttagaggtataaactttttaaccaaatttttttattagccaatgacaggataaggaagaatttaaaaattgaaaaaannnnnnnnnnnnnnnnnnnnnnnnnnnnnnnnnnnnnnnnnnnnnnnnnnnnnnnnnnnnatcaattttttatatagttaatttacaatagttaacccgctaaaaaggttatgatttatattgttgctttaaataagaacctctagtttaaaatctaatacaatgaaagtgtaaaaattgtgagggagtgaatcttttaggacaataaattgtaatcgttaattatgaaatcaaaagttgtcattataattaattttagactttcctatatatgtattttttattttataacaaatctcactgtcgattttctaataatatttattattgtactttattatttaaagtgcaccttcctcgcattagaggaatcaaagcttgcaaaacaatttttcattatcaatttgttactgtaacaaattaggtgagaaattagttttaagttaattagtgtaaatataaatcaatgcaacaggatgactatcaagatgataggggtgttcacgagtacgggtcacccatgaacccgaactgatccgaatcgatctgaacagtttgtgttgggttatttatatatttgggtcaaaatcgaaccgaaccgatcaaaaccgttcatgtacggattgggtcacgggtttagatttacagatctgttgacccgatccatgaacccgtaataataatataaattttattatttatatatatatattaaaaattaaaaaataatttgataataaaaaaagttataatattgtaaatgtttaagattacattcaaaaaataagataagatattttttaatattgcattaaaaagtaggatagaatatttgtaagattgcattacataatataatagaatatctttaagattgcattggataatatgatagaatatatttaggattgcattcaaaagttggttaaaatcatatctttaaattagtataaatagaaacatattttggtgtttatgtatgcattccattccaaataaaattagagtattagagagtttatgtttgcatcattgagagaattgttgtgagatcatatagaagcgtttgacaagtttgattcttcaactctcaatcaggatttaaaggtacctatttacttaaggaatataagcgtaaatgtactattttattgtattcttcttcttgactttggaaaaggttgcagttggaaactaggataccagttttgtctctattcttgatgaattgagacatgcgacttctggctggaaaattaggataccaatctggttgggaaacaaggatatcagtctatctctattattggtaaattgagactacaactttttgctgggaaacaaggataccaaatgggataattgttgtgtaagggtagactaggaaactaggatactaggaactcttgtacacaaaattatcatagtggagttatccattggattgattatccaatttggaagtcgtgattttttacccaattgggttttctacgttaaaattgattgtgtcttctttatctcttatttccatattattgcttctactgttcaaataaacaaggtccatgttacttcacttatatttttgtttatttgtttgattcaacaaatatggttgcaacaaaattggttataataaatcttaatttgtaagaaacaattatgattcagactattatagtaaatattgtttacaaatcttttgttttaatttatattataagtctattttataatattatgttgatggtattaaatgaatcaattttactactttcatacattgataatattgtattaattgtatgagatatttgaaacaatcgtgatataaaataatagttataaaaaaaattaaatgggtaacccggtgatccgaaccgaacggaactgttcatgaacgggttgggttgggttgagtttcaattttttttcctgaaaaccgaaccgaaccgaaccgaaccgatcaaatttgattgggttgggttctaaatttagctaaaaccgatccgaaccgacccgcgaacacccctacaaaatgtatatttaattaattgacaacttaaaaatcctttataacatcaatacacattattttcttctttttacaataaaaatcaagtcaactaggaaatataaatcaaatttaaattaaattttaataaataaataaaaatatatgattagaaagaaaaatttattaaaaataatttaattaaattttccgacaaatataaatcatccacaaaattaagatatacttctgatcaatgtcacaataaaaaatatatacaataattcttaaaatttagtttaacatggacgtggataattgtaacttttcaaactagtttcaaaaaataaaattaaaaatattttaatttaatttatataattgttgataattcaaatttatacaatttctctacatccttattcctttctttaggtcgattattactcttcactcttgtacataagttaaaaggataaaatatatttataatctttaataaatatttaaatttatatttttaatatattttattattttttgttttgatttatggtcttgacactttttttagttcctcataaattaataaattttataattattttttaatagtttttttatttgttattaattcttttataaaaaactaataacaaatattttttattggaatatcaatgattaaaaataaaaatattattttattaaatatttaataaaaaaacataaaaaatatagaattcaaatatttattaggataaaaatatattttaacctaaaagaaattcaacatgtgcattttgttcatatgaggtgtgttgatggtagagggagaccaactcctgaattaaagcatccaaatttgagtaagaagatcctccttccactgcttgtcttgccgtctgcgccaacacttttgctctgtttctcattccctctgcttctttcttttgccaataccattttcccagccttctctatcgctctatttgaaatcgtaccgaaccctaatttaattgaacaaaagctaaatccaaaattgaagaacacagagaaagcacaaattacacacacttcacttcgtcggagtgggcgatgttagatttggcagttcccatcgtcggagactccgtggcattgcacatcagtgttgttttctcgaggattgtcaatacagtgtcgaattccagaaaatgggtttaaaaatcaacatcaaagtaagaatgtgtgattttcaatttgggaaaaaaaggattaggcgaaggaaactgtttttgtcaggagcaatattgcattgctgcttcttcctatttttttttttctttttcgtggtgacttttaaccgtcagtatccgaatattattattaacggtgttaactaatcgataattttgagcttattttttttttctttaatagtgtgtcaattcttactttatgtttatttcctcttattaactattaggttaaaatgtaattttttaaatatgtaattttaattttctattttttaattgagatattttttattcacttttaaaaaatttatgattttaattgaaatattttatccttcatttttaaagaaatttaaaattttagttttgattagccaattgagaaattttctttagttgagacaaaaaaatctataatattttcatagataaattatattatgaacttttacaaaatacattcttataaataataaaatctaaaaggataaaataagaactaatttatttatttattttttataatttcttactaaaaaaattatcttatagagaaatttctatttttataggacaatttttttttnnnnnnnnnnnnnnnnnnnnnnnnnnnnnnnnnnnnnnnnnnnnnnnnnnnnnnnnnnnnnnnnnnnnnnnnnnnnnnnnnnnnnnnnnnnnnnnnnnnnnnnnnnnnnnnnnnnnnnnnnnnnnnnnnnnnnnnnnnnnnnnnnnnnnnnnnnnnnnnnnnnnnnnnnnnnnnnnnnnnnnnnnnnnnnnnnnnnnnnnnnnnnnnnnnnnnnnnnnnnnnnnnnnnnnnnnnnnnnnnnnnnnnnnnnnnnnnnnnnnnnnnnnnnnnnnnnnnnnnnnnnnnnnnnnnnnnnnnnnnnnnnnnnnnnnnnnnnnnnnnnnnnnnnnnnnnnnnnnnnnnnnnnnnnnnnnnnnnnnnnnnnnnnnnnnnnnnnnnnnnnnnnnnnnnnnnnnnnnnnnnnnnnnnnnnnnnnnnnnnnnnnnnnnnnnnnnnnnnnnnnnnnnnnnnnnnnnnnnnnnnnnnnnnnnnnnnnnnnnnnnnnnnnnnnnnnnnnnnnnnnnnnnnnnnnnnnnnnnnnnnnnnnnnnnnnnnnnnnnnnnnnnnnnnnnnnnnnnnnnnnnnnnnnnctatcattaattttagattttattatatatgtattttactctataacaaatgtcaccattgatttttagttaatgatttttattgtactttattttctaccgtacacttccttattgagccaaattctttaagcaattttctactatcaacaaataactcaagttaggaatgactttttatatatgatatatgattatcatacatgataatatctaattaattggaggtataaaaactctttacacgattaatgtatataactttttttttcttttttacataaaaaatctagtctaaaaaaagaaaaataaaatcatcaatcaatattaaataaacaaatgaataagcgtggttgaagagagaatctgacctaacccaaataactagttaaatttttcgataaaaattaattaattgatagatagtttgcattctgaaaaaaatttaacattagtttcttaaaattcaattcaacatttggataattgtaacctgtcatactatgtaatttgaagacaaaccaaaaagaaaaaaagatttcaatttaatttatatcattgtagataacacatattcagacattttctgattcctactcatttatttccttcttgaggtggattattcatcaatcttaggaatcaaattttaaatgggccttttgttcttgtaagatgcctcaatgggagagggaacacaactccagaactaaagcatccaaatttgagtgagaagatcctcctttttccaccgcccgtcttgccatctgcttgaaaacttgtgctctgtttctcatttcctcaaccattaccattttcacagccttctctaatgcatcccacttaacactaccatcccctataaaacgagtccattttttaacaccaacaggtacaccaattttaagtacctcagtcaccaacttctcattgtaaaattgctcggcacccacaggccaagtgatcatgggaaccccagcactcactgcttccaacgttgaattccatccgcaatgcgtcacaaacgctccaattgcttggtgttcaagaatcaacgcttgaggcgcccaccctcttatgattagtcccttaccttccattcttttctcaaatccttcaggtaaccatttctctcccttttcttggatgcttttcctaacgacccagatgaattgttgtcccgatacctcaagtcctatagcaatctctagaagctgtgaatcggaaaactttaccgcacttccaaaacacacgtaaacaactgaattagttgttttcgtgttcagccactttaagcacacgttctcatcaatagacgcttcatttcctctatatgttttttcctctttatccctattgcatagagacaaagggcctatatgccatgcttttctcccaagttcctttctgtaataatctgcgtaatccttctcaagttcatagaagctgttaacaaccactccatagctcctcacctctgattcatatatttgtttccaaaatctgctagagtccacgtcgtctttcctaaagaaatttcccacctgcaaccttgtcattttgatttcaccagggaaatcaggaataacgaataactccgtgtccgaagaagtgttgttgtaaggctcgtagagactcattatttgggaagcgcacaaggagaagaaactaatcccgtggaatacgagcctgggaattccaaatttttccgcggaatcggttgtccatgggaagaacatgtcagcaacaacacaatttggacgctgttgatgcaatagttgctcaaagggctcttgcagcaaagcagtggccataatgaaggctggaaatagatttggtgaagggagtgagtcgtagtgttcgcatccttcgggtaaaccaaactcggtgccagggaatttcaaggtttggatttggatttctttgccttgatgagttttgtttttttctatggctttggagatgataggtgcattgagtggtgtggtgattatggtggctctgacaccttttgtagcaaatagtttggccatgtcaaccaaaggtatcatatggccatgagctaggaaggggaagaaaaacatgtgtaaagaaccatcgttactggccatctttcacccttgggatatattgttggtaagaaaattcagattatacactgaaacaagtagaaggggacttgtgcttatcagaggatggaggatttataaaacagtgatgtaggttaaaaatgtgtacgccttaatttgcatttttgtgttgttaattaatgtctaatgactaatcacctataaaaacattcatgcatttaactacaagctaaacatgacaaatcataataaatatatttaattaataaaacacggaattaaactacaagctaaaatacaaaaacatacttgcaaatcataataaatatattaattaataagacacggaatttaattataattaaattcatttcctcaatttttgttatcccaaatcaatattaaaaaaaaaactaagaggatttttgtttcatgactatttagttattcctagaaatacatgatcagaaaaaattatcccacttttgttatgaggtcataaaaaattaattatgagtatattttatttttggaaaagatataatttcgtgttctnnnnnnnnnnnnnnnnnnnnnnnnnnnnnnnnnnnnnnnnnnnnnnnnnnnnnnnnnnnnnnnnnnnnnnnnnnnnnnnnnnnnnnnnnnnnnnnnnnnnnnnnnnnnnnnnnnnnnnnnnnnnnnnnnnnnnnnnnnnnnnnnnnnnnnnnnnnnnnnnnnnnnnnnnnnnnnnnnnnnnnnnnatatatatatatatacctttttactaaccactacccccactactctcaaattgttccttcatgatatgtgattcaattttttttccatcccgcaaatttcatctttcccaactaatgttttcgcaaatttatttactattagttttattcctacattttaccatagtttttcctttacctccaatgctccttttttaataagcaattttttttttatttctctttcaattatcataatatgaagagaaaacaagaaatgtaaagagagtttatgtaataaaaatattttagtaattaatcatttctaggannnnnnnnnnnnnnnnnnnnnnnnnnnnnnnnnnnnnnnnnnnnnnnnnnnnnnnnnnnnnnnnnnnnnnnnnnnnnnnnnnnnnnnnnnnnnnnnnnnnnnnnnnnnnnnnnnnnnnnnnnnnnnnnnnnnnnnnnnnnnnnnnnnnnnnnnnnnnnnnnnnnnnnnnnnnnnnnnnnnnnnnnnnnnnnnnnnnnnnnnnnnnnnnnnnnnnnnnnnnnnnnnnnnnnnnnnnnnnnnnnnnnnnnnnnnnnnnnnnnnnnnnnnnnnnnnnnnnnnnnnnnnnnnnnnnnnnnnnnnnnnnnnnnnnnnnnnnnnnnnnnnnnnnnnnnnnnnnnnnnnnnnnnnnnnnnnnnnnnnnnnnnnnnnnnnnnnnnnnnnnnnnnnnnnnnnnnnnnnnnnnnnnnnnnnnnnnnnnnnnnnnnnnnnnnnnnnnnnnnnnnnnnnnnnnnnnnnnnnnnnnnnnnnnnnnnnnnnnnnnnnnnnnnnnnnnnnnnnnnnnnnnnnnnnnnnnntgaagggatcaggttctatctaggataataatttaaattaaataattaataatattaaaattcaaaataatataaataatttacttatataaattataaaatataaatttaatagacgtgtaatgcacgagacaataagctagttatatgaaataatattgtaatatgtattatactttattatttaaacaaatattccatagtattttttaaatcataattacatagcttagaggtataaactttttaaccaaatttttttattagccaatgacaggataaggaagaatttaaaaattgaaaaaagagagtcaaggttcatccatttcttttttgtataaaacactcttttagtcttaaaacattaactttttgaggtattaagaatttgactaaaaccataaaaaattgaaaaagcataaaaaattacagatttttaacttcaaagaataaacttattaattacaaaattaacaaataattcacaacaaaaaaaaaacctatttccgacggccgaaatccgtcggaaatatcaaaaatccgtcggaaattcgagatttccgacggaaaaaatccgtcggaaaaacggtcgttgcaaatattttcgacggattttttggccgtcggaaatttccgacggccaattccgtcggaaatttcccacggcttattccgtgggaaatttcccacggccaattccgtgggaaattttcgacggccaatttcgtcggaaatttccgatggccttttccgtgggaaatttcccacggccaattccgtcggaaatttccgacggcctattccgtcagaaatttccgactgcctattccgttggaaatttgcgacggccaattccgtcggaaatttccgacggcctattccgtcggaaatttccgacgacctattcggtgggaaatttccaacggccattcatattacctacggctcattgagttagtaattttcgtagattatttatttattgatattaaataacatgataccaaaataaagcatattataaaataaaaaactgaattcatacattcaaagtcaaatgtttaaacaaacgaaaataagttccaaatataaataacataataccgcaatgttaaacatttgataactgataaactgtttggaagtcaataatcaacatagtcattgtcatcctctccttgctggtcatttgctggttcatcattgttttgttgttgtgcatcatgtggttgatcatgttgttggtgttgttcttcgaccagttgttgttgctgctgcataatgctgcgagcttccggaggtagaaattgaagtacaactgattgaaaaactcgcatttgttccgtggactgacgtaaagcctcttttgattgacgcagctcctcctttgattgacgaagctcctcctttatttgatgaatttccgctgattcataggcatggctagatgacccatgcaagttttgcacgaatgtctcatctccacgtttgtaagaataagcaagatcgccagttccgtaaagacgtcccttacgcataggtccagccgctgcaatccaacactgactccttagtctttgttcttcagcaggagacaacggagtcatttcagaatcaccaacactagattgaacatcagatctagcttgagacaacctagcctcaaaattttcctgtcattgaaaaacagtgattattaacataaaatgaataaaacatgatgttttaatacaaaaaccatgacaatttagcatctcacatgtgtttgcctagatctatcatcgacaaattcaccagtatccttccgtagatgtgtttgttgaaaaatctcatcgatgtatgctgatcgaccaagttcctgagactaataaaaaaaataacaacaaaaatataacataatcacattttatgatgcaaacaaaggtaacatgaaaatttttagaaccatcttaccaatcgaatnnnnnnnnnnnnnnnnnnnnnnnnnnnnnnnnnnnnnnnnnnnnnnnnnnnnnnnnnnnnnnnnnnnnnnnnnnnnnnnnnnnnnnnnnnnnnnnnnnnnnnnnnnnnnnnnnnnnnnnnnnnnnnnnnnnnnnnnnnnnnnnnnnnnnnnnnnnnnnnnnnnnnnnnnnnnnnnnnnnnnnnnnnnnnnnnnnnnnnnnnnnnnnnnnnnnnnnnnnnnnnnnnnnnnnnnnnnnnnnnnnnnnnnnnnnnnnnnnnnnnnnnnnnnnnnnnnnnnnnnnnnnnnnnnnnnnnnnnnnnnnnnnnnnnnnnnnnnnnnnnnnnnnnnnnnnnnnnnnnnnnnnnnnnnnnnnnnnnnnnnnnnnnnnnnnnnnnnnnnnnnnnnnnnnnnnnnnnnnnnnnnnnnnnnnnnnnnnnnnnnnnnnnnnnnnnnnnnnnnnnnnnnnnnnnnnnnnnnnnnnnnnnnnnnnnnnnnnnnnnnnnnnnnnnnnnnnnnnnnnnnnnnnnnnnnnnnnnnnnnnnnnnnnnnnnnnnnnnnnnnnnnnctattactttcaagaatatcaacaaatgtatttaacaacaccaacaatgaaaaaccaatttaaatgttgaatgagcaacaatactagacaattaatgaaatgaaaagatacgacatcgttacaccgttcaaattagcatgaatgcaacattatattaccttaaaacgttggaaaaatagatcttgatggtcttttggaattgctccccaagttggccatgggtgatcaaattgttgtctaatggacaatgtgagagcctttgccgcaacctttgatggatgaaaacttaagacaccaaataaattgtcaatgcttatgtccaataataataaaatgtcatgacatatttataatttatgtataatgttaatacttacgctccatttatcagtgtaatcgtcggacgatcagtcataggggggtcatccactaccaaatttgctaaatgttcatcaaaaggtatgtttgctgcacttcgggtaggagatggtgtgtttgtaggcactgtggacggtccagcagcattaattggaatagatggtatagcttcagttgaaggtggagatggtgtaggtaaaaaatctaatgatcttattggcatagatacactagaaggggatgatgtagatgacggcaaattatctctaggtggtaatagtctaactacatatcgttttttctttccaactgtccgattgtcaattttatcattgatcggcggttgcggaggatcagcaccacctgatgacatatctatatgtacaaaaaagtgataggggaattaaagttataaaaccattaactacttttaccgaactcgcaattggttccttttacacaaaaaataaaatacattaacaaagtttcattccattacaagaatacaataaatatttcataagttcggaagataaatatttaacatgtctttaactactttctgacattccctctctgctgtttcagatcgtacagatattctttcaatgttagcttctccatccatagaatcttgacactctaaaccatattcaactgtttcaacatccataaaattttctaaactgggaacacaaattcttaatatgtctctaaatactttatcataatccctatgtgtcatctcggttctcataaacataggttcagtatcgtgtttttcatccaccaaatcatctaactctaaatagtctgcaactgtgtcatcattgattccatctcccaaattcggaagataaatctttaacatatgactaattactttctggcattccctctctgcagtctctgatcttacaaacataggttcaactttgtctaaatcataagagtcttcaacaatgttaacatacgttgagtcctctaaatcaaaagagtctttaactctctctatatgtatagaatcttcagctctctgaacactaatactgtccttcatatttaacgagtcttcaactctgttaacatccatatagtcatttacatctaaagagtctggaactatctcaacatccatggagtcctctaaatctaaagagtcttcaactacctgagcatgcatatcatcttctaaatgtaatgagtcttcaactatgtcaacatcgatggatgcctctaaatctaaagaggctttcactatctcagcatccataaagtttgttcaatgtaatccaaaatcaactatgtaatcattaacacaatgttaaactatgtctaaatttataaactattgaagtctgttacgataatggaatataatatttatttggctgtagtttcataatcatttattatgtatataacatccccaatgcataaaccaacacatccatacatgtgcaaaataatattgaaaacatacatacatacatatatacacgattcaacttggtatataatcaccgtatgaatggatgataacattcaacattagcagtgcaaccatgtcatcatcaatacatataaaacaaaagaaggtggttcatctaaaatttctatacaactaattagggacggtgtttaacattgattgttggagtcaaataagtattaagtacattgatccatttgtaatcctattcagaatcataaacctcaaaatcatcttctaattcgccttcattttcttcttcaatattatttgtttgttcatgcaaagtatttgattgggaatcatttacgaaaacatgatctgggtccacttcttcaaccccacctctctgatcttgcaagccataaacgctttcaacttcgatgatttcattaccatgtgacatttcctctacttgataaggcacatcagttggtgcattgttatattctatgtaacccctgggctttgttttaattgcaacacaccaatcacgtttgtccggtcttattgcgggataggaaacataatacacttgtctgacattctgtgcactaatgaatggatcaaatagattatatcttcgatccattcgaatttccaccgttccatcttttcgatccactcttgttcccctactagatggatcaaaccattcacaataaaacaagataacttgcttagcataacttgtactattatattgtagctcatatatatgtttaatgatcccataaaaatcatctgctcctccttctgtaaccccctccacataaaccccactatttatggtttttttgccctcactccacgcttgagtatgaaatttgtatccattgacaaagtatgtgtgccattgtttaacgtaactcataggaccataagataaatcctttaagtgttggtttgtgacatttatagcagaatttaccacctacatatacaataagaatcaacaatttaactcacaatacaatacaataattaactgattaataacatacatacttgttcatgaaaccatcttggaaaatccgcatggacattacgagtataaccatttgattcagtaatctgttgggtgcgttaggcttccatgggacaacaaccataacttcaaatgtatttgaagaaaagtatgtcaacttactcaaggtatgggctaacttctgcacagttaatcaggacatgaacatgggccgaggttttttcttcatcagtcaaccagtgtatgacctccttcccagatggacgaccttgttggtcaaacactgataacattcggggacgcggatcacttgccattgtactttgattcctaatgttgcgtgacgacaacataaagttatggaaataatgcgaacaaaattgggttgtctcacgatgtaagtaaaacgcgcagatcgatccttcgacccttgccctatttttcacagctcgtttacaatcacccatgaatctacaacatttgcataacatatcagtcagcagtcaacgttattcatttgacatgttaagtgatgcacaaaattaaatctgttacctctcaaatggatacatccatctatattggactggtccgccaagtctagcttcgtatgccaaatgaacagccaaatgctccatcgaatcgaaaaaaccagggggaaatattctctccaacttgcacaatatcaatggcattttttgttccattttacatagatcatcctccaacagagttgaagaacacaaatctttgaagaaatgacttacttcactaattggattcaacacatgtgctggcaaagagctaaaagcaacaggtagtaaacactgcatgaatacatgacaatcatggcttttcattccatgcatggtgcccttggcaacattggcacatctagccaggttagaacaataaccatccggcattcttagttcttttatccaatgacatactaactttgtttggtctgttgttagagtgtaatttgcttttggctttaaaaatttgccgttagcccccagtttcatctccaagtctctccgcctacagtacaatgtcagatccaacctagctttctcattgtcttttgtcttgccactgacattcatgatagtgttgaagatgttgtcaaaattttttttttcaatgtgcataacatcaagattgtgtcgtaacaaattatctttccaatagggaagatcccaaaagatgcttcttttagtccaatgatgccactcgccatatccagatactgttggtggaggtaaaccagtgtcagtgacctttgctacatccctaaccctccgccaaacttgtgtaggtgtcaacagacgtgatgggtcatcagtttccgtttcccctttcttgaatgcatttttgtttcttctaaatgcatgatcaggtggtaagaacctacgatgacagtcaaaccaagaagttttccccccatttgccaactggaaggcctttgtgtcctgcatgcaatacggacatgccaatctaccgtgtgtcccccaaccagaaagcatgccatatgcaggaaaatcattaatggtccacatcaaagcggccttcatcatgaaatttctacttcttgaaacatcataagtcacaacaccattccacaatgtttttaaatcatcaatcaaaggttgcaaataaacatcaatcccaacggttggattacatggccctggtaccaaacaagtcaaaaacatatacggtttagtcatacatagttcgggaggaggattatacggggttacaatgattggccaacacgaatatggtgtagatgatgcttgaatatatgggttaaatccatctgtgcataaaccaagtcgaacattgcgaggatcactagcaaagtctccatgtacacgatcaaagtgcttccaagcttcaccatcagagggatgacgtaaagtccccgcaccatttctattgtcatggtgccatgtcatatggcaagcagtttccttggatgcaaacattctctgcaaccttggtattataggcaagtagaacattgccttaactggaattgattttttattttttgatcccagactattaacacgatatctgggcttgtgacaaaatttgcattcagttaatgccccatcatttttataaaataacatgcaaccatcaacacaacaatcaatcctcttagcctctaatcccaacttagatactaacctctttgcatcataaaagctttttggcaaacgttcttttataggtgtgacatccaaaagcatttttgaaataaactctaagcattgatctggaacattccaattggacttgcaagccaacagtcttgcggatatggataattttgagtctaatgccccttcgtacaacgggtgattggcatccaacaataaattgtaaaatctttgtgtatcttcattgggaggctcttcgatgttagttgagtttggaacctcaactgactctggctgtcggagagcatcgcataccatgtcttgcataaacaaaaattcttctacatcacccacatttgttgtggtatttggtgcatccatgttactatgctcgtcatgtaaacgagaatttgacatgtcctcaccatgatcagtccaaacccaataattagccctgaacccatatttgtataaatgaactttcacaactctatcctccaaaatcctagtacaatcacatttaacacaaggacatctgatccccccatcattgttatagttgtcttattgactagctttgttcacaaattcatcaacccccctgacaaaagactctttcagaccatttctacgactataacatctatcgtacatccaaagtcgattggagggaatatagttcatgttctgtacattatgtcaacaaataggaacatttataaataacataaatgatacaatatgtcttcgtaatggtaatcatgtttaacgtaaacacaataattacataaataacacatgcatcatattaacacaaccgtaaatatatgtaacacattaagacaatcgtaaatataaataacacatctgacatatttaaagcattcattacttttatattctcctgtaaaatatgaatgttcacagtccattaagatgttgttatagctgtgaattgtatgacaaagtttgacaacaagttctcgaataagtacctgcgtctgatacttggtgatacaggttgcggctcccacacacgtacttaatgttgtttctgctgctccacgaaactatgtcagcacacaatcatttaagttgttccacacaataattgttgtgtggtttttaatgacttatagacacaaaagacaatgtaaatatgctaagccacttattgtcttcaagagggatcaacttgcctgttgttatgctgcagcttatctaatttgtacactgttgtttatgttgttgttgttgctaaaactggaaaacataaatgatttacatattgtcagtgatattagctatctaacaagtcccaccttccataatctcatatgttattcccttcaaaaatacgtaaatggaaatgcttatatatatgtgtgtgtgcgtgtgtgttcagtgaactcgaaagtttttcctatctatgatgacacccgcaaaaacgttgcctgttgcaaggaagtcagaatgaaagatgatatcggaatgcccacattcaagatatttacaaacaagcatgcaagttcaaaatttgtactcacatcaagctaatcaccatgaaaatacaataattacacacttaacaatttatcagcttgaaggaatttaaacaagaagaactgatgaacaaacttgacgggaattcccagatttaatttcaacctacggattcacaagaaaagtatccaatcagaaagctggtgctcatattccttaagtaaatcaacccctagtcatgcaactatatggtcatctaaatccacactagcacaagtcattcaaaactgcaatgtatcgcccactcagcatcctaccttatcatcataaagcacatgcatatataaagcttatttgcagtataatttccagattagattcacaccgtaccccataaaagaaaatgcttcaaagtaaataatcaaatcaggggttacatgcatcctggttaaggtattctgattttcaacattaaactcacaacatgacttactattcaatgtgtcatttcattattttaaggtcttattaacaatttcagtgtatcaagcgaacaattgagtattcatgacaaatccgaaaaccctagacactctgaatcatgctccacatggtttcccaacacatgataacactgttggatatgactcatctttcgtaatcagatgacaacccttcttgttggcggggtcagcagaaagccaactggggttgtcaaaattagtgctttctagggtgttcttaaacctcagagcaacacaaagaaggaaggttaccatctcactaaaaccttgactattaatggatacatatcaaattggtgaaccccatcaataaagcataggactaggcaactaaggacaacatgtaatgaacaaataagcaagtacgcacaaaagcccagccacgccactggcgtggacatccacgctgccagcgtgggctgggaaaatggcaagttcaagaactgcatcacgaagccatgttgcccttttccctttttattctttaagcacaaaaggaaaataagtaaagggttgcgtaccttatcacgagccatggaatgcttggacaaatgataaatgcaccaattggaaacccaagagagcaccaccaagaggaagaaggaatgggtttgctgaggaagaatgtgaaggtgaaaagggaacgagagaatgaaggacagttatggggagttaatggggatattggggagttaagagtggttaataggaggtggaggttagggtttagtgagaggtaatgagttgatggaagttagagagagtttagaaggttcggggtttgggaaatgccaacaggttattgaaaattcgaatttaaaaagttgtccctaagataccacgccccaggcgtagggttccacgcccctagcgtggaaagacagggaatatgggcattagaggaagctggtcacgctccaggcgggggtcaccacgcccttggcgtgggatggcagtgagtttaggcctttggagaaggttcccacgctcccagcgtggatggccacgctccaggcgtgatatggcagggagaaaagctgttccaggaggtacaccacgctatccgcatagctagccacgctcccagcgtggggagacagaggaaaagggcttaacagggaagatcccacgcttccagcgtgagaacccacgccactagcatggactgcagggttttcaattttatcccaaagtatggctaacctttaccaactataatcatgcttgaattaaaaagggaggagaacacacaaaaaaactaatcgaattgggattatctcaagtaatatgcaatgaagaagctaattgaatctaaacaaaaagcttataatcaccaagcaccaatggaattgagaaaggattacaaagctctttaacaagtgggagaccaaagctaaaatggaatcaaccaaagcaaacatagatcaatcactaaatggatagtgatgatgcatgatcaaaatggctctacgctataaagcagaagcatgaaatagttgcagagcacaatcaataaaaattgctgctgaacttcttaagcatggctagaatcctcagactgattccaaatgatgcctttacacattgaagcacactcaacatcatgtcatgaaccaaannnnnnnnnncatcttacaactaataaagcaaatgataaaaataataaatgtacaaaatatataacattttcacgcaaagtataaaatttttaaattaacaaaaaaatatcaatacaatgtaaattattaaataaataaaaaattattaaaatattttttttattcataagagttaaagattaatataaaaaaattcataataacttatatatgaattaagttaaatatgattgatttttttaataaattgaaagaactcgatactatagaataagtttattattcttttaataatgaatttaaaagttaattttttatagaaattataaaaaaatttgttaaaaataatattgctcgaataattaaaagaaacaagattcattatataaatttaaaataaactgttaaattaaaataatttcatatacttaactaatacaatatttacaattattgttagacaaacaagattcattatattgtttaaaaatatttagaattatttaggaatagaaagtaaatatgtttggaacaaagtcataaaaaccaaaaaagaaaaagaaagcataaaaacaaattcagatagaaataacaaagtcaatgaannnnnnnnnnataacgtatacttataaggttaagaaaagaagataataacttaatttaaaatttaaacactttgattatattattaggtgatgatggttaaagtagattatttaaaaaactccctaatggcatacttagagaatcatagaaactggacctctataaagatttggttagacaacaacattagactaacgttaattataattataaccaactactgatttacatattccatgtcgtttaaaagtaaaaagttacttttaactgttttataatggacatgttttacaattttgaagtgatattgttagtcacactttcaaataccgctgtgaccttgttagtcacaaataatgcacagtaataaaattcttttatgatcaaatttggtatatgcatgaccattccttttacttaattattacatactaatgttaatgtcaataacaacatattcaataaatttatttacaataatcttatatgtctttttacatcttacaactaataaagcaaatcataaaaataataaatgtacaaaatatataacattttcacgcaaagtataaaatttttaaattaacaaaaaaatatcaatacaatgtaaattattaaataaataaaaaattattaaaatattttttttattcataagagttaaagattaatataaaaaaattcataataacttatatatgaatnnnnnnnnnnnnnnnnnnnnnnnnnnnnnnnnnnnnnnnnnnnnnnnnnnnnnnnnnnnnnnnnnnnnnnnnnnnnnnnnnnnnnnnnnnnnnnnnnnnnnnnnnnnnnnnnnnnnnnnnnnnnnnnnnnnnnnnnnnnnnnnnnnnnnnnnnnnnnnnnnnnnnnnnnnnnnnnnnnnnnnnnnnnnnnnnnnnnnnnnnnnnnnnnnnnnnnnnnnnnnnnnnnnnnnnnnnnnnnnnnnnnnnnnnnnnnnnnnnnnnnnnnnnnnnnnnnnnnnnnnnnnnnnnnnnnnnnnnnnnnnnnnnnnnnnnnnnnnnnnnnnnnnnnnnnnnnnnnnnnnnnnnnnnnnnnnnnnnnnnnnnnnnnnnnnnnnnnnnnnnnnnnnnnnnnnnnnnnnnnnnnnnnnnnnnnnnnnnnnnnnnnnnnnnnnnnnnnnnnnnnnnnnnnnnnnnnnnnnnnnnnnnnnnnnnnnnnnnnnnnnnnnnnnnnnnnnnnnnnnnnnnnnnnnnnnnnnnnnnnnnnnnnnnnnnnnnnnnnnnnnnnnnnnnnnnnnnnnnnnnnnnnnnnnnnnnnnnnnnnnnnnnnnnnnnnnnnnnnnnnnnnnnnnnnnnnnnnnnnnnnnnnnnnnnnnnnnnnnnnnnnnnnnnnnnnnnnnnnnnnctaaaaataaatttgattatatttcaatgcaaaaccaattaattttaaattattttttcacacttctatattgatttatagtagggtttattaaagttatggatcaaattctttaaaaattgatttttttgttataattatatataaaaaaattaatatttaataattatttaataaacaacatcattatgttacttcaagtaattacaaatactgaaaaatagagttgttaaatatttatcctctcactcaaattcttttatgttatcctcttacaagtaataaaacaaatgataaaaataataaatgtgcaaaatatataacattttcatgcaaagtacataatttttaaatgtacaaaaaaatatcaatacaatgtaaattgttttgacgaacaatttttgcaaaaatattgttccgaacatattttgcacataatactctccgacccatgaccaaatttccctcattgacaaaaatatttcaaacaaatattttccgtcggaaattagcatttccgacggaattatccgtcggaaatgccaaaattaccgacagaattttgtccgtcggaaatttccgacggataattccgtgggtaattttcgacggaaatatctgtcggaaattaccgacggccatacccgtcggaaattacccacgaaaatatccgtcgaaaatgcttaaattaccgacggaattttgtccgtcggaaatttccgacggaaatatccgtcggaaattaccgacggccatatccgtcggaaattacccacggaaatatccgtcggaaatgctaaaattacctacggaattttgtccgtcggaaatttctgacggataattccgtgggtaattttcgacggaaatatccgtcggaaaatccgtcagaaattgaattatttttcacggtataattatcgacggtcatttccgtcgataatataaatgtttccgacggaatttttccgacggaaaataatctgtcggaaattactttccgtctgaaaaatccgttggaaatgctgaaatttccaatggatttttgtcagtcggaaaaattccgtcggaaatagcttttttttttgtagtgattaaattcttccaaatcgaataaaaaattgagataaaaaataaaaaaacataaaattatagactttttgacttcaaagaattaaattattatgaaataattaaattcttccttatatcttgatttgaccaataacgaaattgagatgaaaaaaatacatacctctaatgcataaagatattaataaatgttttatttcaaaaatattatttaatataattaggattgagtatgttttttgttctaaacttttttaaatttatatgtttagtctttgaaaaaaaagtttgaatgatcttagtcccctacacatttgtaacttattgatatgagttcgaatacgaaaatagtctttttgtataagtaagggtaaaattgagtataatatccttagctcttatcttcttataaggaagaacctctgggaaaatgaattacgtatttttgaataataattcatttctttattcaaaattactaggaagaaattgcctaagtaacaatgtattgaaagtcgtgtgaaacttgatctgagactagctcatcaagaattatcttactccttggcttataatttgccatatagtcctcctctaagaaggtcacgtgagtgttcactatgaccttcttttcttagggactataaaacaatcatcctctggtttctttaggatagcctataaacatgcatacttctgtatgcgagtccatcttatttgacttctgttgtaagacatgtgtcggagcatcccaaatccgaatatgattcatggtgggcttacaccctttccataattctattggtgtctttgaaaccgacttggaaggagctaagttcagaaggtacatatcagtttctaagggatatccctagaatgattcaaaaagagatgaataactgctcatagctcttgccatttctaaaagagttctatttctcctttcagcaacttcattctgttggggtgtccctggagaagataattgtgaaactatcccctctttggttaggtaaactcttcaaataggtattcaccccctcggtcagaccaaagagtcttaatttgaacaccaagatgcttttctgcctcagccttgaactcttggaattttcccaatgcttcagacttgagatgcatcaggtacacatgtccaaatctggagtaatcatcagtaaatgtgatgaaatactgatacccgcctctggcttggacatttattggtccccatacatcagtatgtaccaattccagctaaagtgtggcacgatttcctttggccttgaaagatttcttagtcattttaccctctaaacaagattcacaaactagtatcgattcaaagtttatggattttaaaatcccactattgaccaaatcttgtatcctgttaaagttaatatgacccaatcttaaaggccaaatataagtttcattggaaacttttcttttctttgatgaatgaacatgctcaacatctgctaattcaacatgattaacttcacagggcacatgattaaggaaataaaaaccattaatcatttcatcggaacaaataaaagaagatgaacttcttattgaaactgaggaattaaactgaactgtcaaaccatgtttaatcaaacaactaacaaaaattaaattcctctaaaaatccagaataaataaacagtcttataaaacccaagttctgcaattattaaaagataaagtaacttgtcccactgctagtgcagacacaagctccccatttccaagcttcaaaactctttgtccttcacttataggcaagctatgtttgaaccactacatagagtaacaaacatggttagtggctcctgaatcaatgatccatttatcattgtaattctccactaaacaagcttcaatcacatgtaaattaccatacctggttgattcatacgtgggcaatttttcttctaatgcccattttttctgcacttgaagcactttccttttggctgcttcattgcaactggtttgacaactgtaatacctgatttcttctttttattgttcttgttccttcccttgggtttttcctttggtttcacagaactctcaccagaaaaataagcacagccctgcttaactagagactgttcaacactttcaagctcgtgcatcagctgagtaaggttaagattcatcttattcatattataattcatcttgaactgattcaagtattcaggcaatgattgcaagagaaggtcaacttttacttcttgttcaaatctgacctcatgttgtttagccttcttgaagtttgctatcattgttagacaatggtcctgcacacttcctctagacataactatcttggtggctgcattcagcgcattctgcctagcagagctgctagacgtagcaaacatgccatcaagagtctggagcatcattgctccactctcaatcatgctcacttgctcctaaaggtgactggcgagactggctagcatatagcagcgaactgccacatttaccttctcccatctttccttcttctgctgaaaacgtgtctttgttgcctcacgcacatccttagtgggctgcgctggcatatgggtagccagaacatgaaaataataggaatacttcacaacaaccaagagagggggtgaattggttgaaccttggtatttttaaaatcaatttcaaatcagagttttcaggatctttatcaattttaaaaccaagaaaccttttactcaatcaaatagctcagtccaagaattcaataaattaaaaccaaacttgttgtgcaatgaatatgattcaaagaataaaagacaaataataagatgagaagagaaataagaacacacacaatttatactggttcacttcaaatcatgaagctacatccagttcttccaaccaacactaggttagagttccattattataaaaatattcttacaagcttttacaagaatcttccatttatcaaccctagacaaagaacaaaaatctaaaaccctattagaaatctaaggagaaagatctagagaacactactctgatctttaagctagagaacctttttctagtcccaagctttaagaatcaaaattacaatagccaatacaacacaaattgtaaacaaaattacaaccaatcagttaaggaaagaaaacacctgatgatctagtgaatgatatgcacgtgaatgaacaaaccaggttgaaagatgaaaatcaaattcagaaaatctccttccttaacccttgaaagaaacttcttgcttgaaagaatcactcaaaaacccataagtgttttagtgaaagcaagaactcatagaacccagaaaaatcacttaaaacttgtttagaaagcttatgtgtgctcagaatacgaattgatcaagttccaaaacaagctgagccaaggttctatttataacaaacttttgtaactgtcaataatcgattaaatgtgcctaataatcgattatttcacttatgtaatcgattaaatcaaccttgtaatcgattaaagtgttctacaagaatctggacattagcaacgaacaaaataatagattattccgtcttgtaatcgattaagacaggaagcttcataaacttgaaatacactgtgtaatcgattacgaattctggtaatcgattaaacaaggaagctttagaaatcatattgaactatgtaatcaattactatatttggtaatcgattaatgcatcaaaactaatgtgcatatgtatatgatgtaatcgattactgaatttggtaatcgattatgacaggaagatgttattttcaatttagcttgtgtaatcgattactatacttggtaatcgattcttctagcacaacttaaaataatgtatgacaatgtaatcgattactatctgttggtaatcgattaaagtgttcatcaaggcagtgttagcgaaaacaaaggtcaaataatcgattaatccgataggtaatcgattacattgttcttgaaaagttttctggaatgaactaagaacaaaacaattgattatctccttaatgtaatcgattaaatcagtacaaattcatttttccaaaaacctttgatttaaattgatcattttaccaaagccttgtgaattttattacttagattaattgaattattgaatgatatgaatgcaatgcacttggatcaccagaattgcttctttcttacacatttaacacaaatcatacttcaaggcatccaatgcatgttgaaagctcaaaaccaaagcttgattcctattccattcttcaaatagctcctctaaaaccaacaatctccccctttttggctttaaacatgccaaatctttagttgattaacagtaagtcttgaagtaatttgttgaatcaatttgaaaaagcttgagcttaaaaaacctaaaaattttcaattcctttgccaagaacaagtgttaaaagcatctgtgattgaagtggcattcatttacaagtcttatatattgaaaggattcattttaaacacacagctccccctaaattccagcatccattcagttcaatattttgagcaaaaatgaaacaaaaaacaggggcaaatagagcactatacagagcatactttaatcaattaattctccccctatttggcttgttaaagacaaaaatagaaaaggcacagcgtataatagaattggaagcataatggaagttttatataagcataggaagccattacatagtgaattaaaataaaaggctaactacttaaaaaacaaagcataaaaacagaaagaaaaacataagttttagaattcaaccgaagcattatcattcatatttgcttctatggtatcaagcctatccctaatctcttctaaggcttcatttgtttcagccttgaagtcctgttgcatcttgatcatggtgtccattttctgcagtatcaaagactcaaactgtgagtataatggttattgttgatcccttgcttcatcttccacgtcagcagcttgatctccttcatcatcagcagctgcaagagcagcaggaagggcagcttgtccagccataatctagccatcaggagtctttctcatccccatcttggtgagatgcttctcctttataaggctgttacttgagttggtatgatcaacaacttcattttccacatcaatgttgaagtggtcaatgaatctagacactaggacaggatatgggaaaggatagttgatcaaccttttggatttgagcattatttcttcaaatattagcacccaattcatgggtatgttgttcttcagaccatagactaattggaggtcctcatctgttgcttgggcatggttggtggccctaggagtgattatgtaggtaattatgtagtggaggagcctatcctcaggtgtcatgggtccagtacccaatctgttcctaagttgcatatgaggatcatgcaacatttctctataggtatccattttgctatacccattaggctcttcatcaaacttcctagccccttcacatataacaccagccacagtctcccaaacttcatgggtgatttccattgtcacacccttgaccttggtgatcatggtcccattcatggaccctttgggacaggtgtagaaaaccttcaccaaattagggtaaaaggtatccttcatttctaaaaatcttctaaccccttgggcttcaaagaatgcagggaattggaatccctccctaataaaccaatttaactcaaggtattttggtgaggctataggcttggttgcattgaattgtaaataatttattttatcagactctgtggagaaccacaagtctagcctgtttgggggttgtgtaggaggtggattggatgaagattcacccactttcctcttagaagacctagcacgtttgggagttgggtttaacatggttcagggtaggtttaaacacaagaaaacacagacaaatttcagaaatttcagagggagaagagactaaggtgcagaatttttctattgatgcaatgcactatttataggcagaattgatgctcttaacgtccatatttttgaaaatatagctgttggtgacagttaaggcactccagtggccttgaatttcttttggatttggttgggcagttacattttcagagaaaaattgtcagaaaacgcacaacagactaaataatcgattatttacttaatgtaatcgattattttgcatatttgggacacatcctaacacacaacctggctctgatactaattgttggcacattgatattgcggaagcatataaatcatttgtggtttgagatgtaactaatcatcatagttttatgtgtttacctcttgtagctttcaacttggttgattgactccttgtctctagtaaatcttccaaactatctcttaaggagaaatgagtagggtgtgtggtcacccctctgttttctaggttttttgtctctttattaatgacctaagtaggagtatttatattagtctttgaactcttctcatagtctcagtccaattgaactcaactaaagagtataggcccaacaagaaatatatattaaaatttgtactgattttattattgtttaaatgaattagtttataaatcatatttaaaatagaaaagttcaaatagatatttattaatgtaataccaaaaaagaatttggtgaaaaaaattggtagtaggagtaaacacccccctcacccattattacttcataggcctaaacctcaagtagattaacctaatcagttaatcttaactacttaaggcatcagggaattacgtgacaagagttgtctatcaagcaggatttgagtgagcacaacgacaaatcaaacccaaaatcataaaaaagatacaaattgattctgaattcttaatcatttaggttaatcaacttagctaatataatattaataaattgataaatatataataataatttatttttaattacgttacttaataatttgataacatattttatttatttatttattatttttaccaaaaacatatatttattaaaatactatttaactttattggacaatcaattttattaatagtaacctatagttatgcattatttataatagtttattaaatttagaaaatgttatatatgtttttcagatatgtgaatttttatatgaatacgtaatttttttaataatcacatagaatttgcttttgatgtataaaaatactacatatcctgcgcatcttctcatcttaaaattgaccaagcgaataaaagggtcatggggttatttttgccgctaaaatgtaaaacggtcattaatttaatttttgaaagaataatttttaaataattcctaagtaaaaaatgtgccaaaattgtcttgttgttaagtgtgtggaatgttaactttaacatcatatcccaaaccccaaatagtctcaaaactttataccttaatttcaaattatttaaaatttataatttaatataaaattcatctttatacatcacaataacataatagtacataaaacaaatacataaattaaagttagcattgtatacttaattataagacttttttatgcaattttttatacttgtgaaattatatttttaaaaaaataattttcaaaagctaattagattacacatttaattcatgtagaataatatagaattatcaaaatagagtagtttgattggttgggtctaatccacctacttggtggccggccaacctgactcaattcacctcacctcttggtgagtcttaaaatgatagtatgaaccaacccaacatgagttgatggattaaatggaatgacccatctaaaactaaaaaaaaaatcattttaaaaaaattttcaacataaaatcaatttcttttagaaaaataaatttcagcaaaaataaatacatttgtggctatatttgcttataatttttcattatttgggtaatttccaaaggaataaattttttaaagcaaaaaaaagagaatcattataagttcaataagccaaataattttatcacaaaagaagtattcatgatcacacatgcaagacaatcattacaagtttaacaagacaacaaataattttatgacaaaaatatttcatgatcacaaaatagtctagataaccattataatttacaagtcactagaattacaatttttgagctaacaaaaaattacaattttgttgtaatgagttggatcacaggtggaccgagtctaatttttaagctaataaaaaattgaaaatggtatattcactcttctctttttttaagtacactcccttttatttaatttttttgtttattatcattaatattctctatactcaaaatatccttataggttgtttaattactattctgaaaagtagtttctcatatgctgttttagtttttaagtttcaaaaagtagttttagaatggaatttgaaataaaagatgatttaagttataatcaaattaaaataggaaaagagagtgtagttaaaaaaaaaaaatgagagtgaatataataattttctaaattctttttgttagcccaattcaacccaaattcgcgaagggtcaaaatagtctgtggattactacccattttgataactttattgactatcgttccaccgctcgctgcctcgctcatttattgtagaaaaagtgacagggaattcgacgtatacaatgacgtaacaatttcaatcaatgtacctcccaagtcacaatcacgtgccctagcattctagtggtgatccatccagaaacagaccgatacttatttacggagacactcatgccgaggaattataggagccaactgtggagcagataaaacaaacttaggaggaaaagataaatacacccatataagagtctatacacaacattaatttgtttaatctggaatctgaactacaacaacatgaaataagtaacaagacaaagaaatatacaaaaatgttataaaatattttataaaaggtattgtagaaacaatcatactggtaacgatttatttatttattttattactatactggtaacgaaattgattgttttatttgcactatttgtgcgttattgtattaatgaaacagatcttagaatagttgtgttcttatctcttggtaaagtaaatgtatatcagtactatatcactttagcaattataattgacaattacgttcagccacggttcctagttttataaattcttcaccctccaaaactaaaggcaaacagagtgtttggtttggcagtaaggactcaaaaaccatggtattccaccatgatttcccaccacaccagagagtagctttaaggctaccatgatttcacaccacggttccaaacttccaaacacgctgaaaatagccattctgtagtagagagaaagatgggtagtagtgaatatcatactctgcacatttttttctttcccttcttggctcatggccacatgataccaaccgtggacatggccaaattatttgctgaaaagggtgtgaaggccactataatcaccacacccctcaacgaacctttcatctccaacgccattggaaaatccaaaactaatggcaacaaaatccacatccaaaccatagagtttccttctgcagaggctggtttacttgatggctgtgaaaataccgagtcaatcccttccccagaattgttgcatccgttttttatggccacctatatcctccaagagccacttgagcagctactggaaaagcaacttccagattgcattgttgctgatatgttcttcccatgggcaactgattccgccgccaaatttggaattcctaggctcgtcttccatgggactagtttcttctccttgtgtgctaccacgtgtatggcattctatgagcctcatgacaaagatgcttcttctgattctgactcgtttgtcgttcctaatctcccgggcgagattagaatcgaaaagacaaagctgccaccttatagcaagagtaaggagaaagcaggcctggccaaattgttggaggaggaaaaagaatcagagttaaggagctatggggttgttgttaatagcttctacgaacttgagaaggtttatgcagatcattttaggaacgtgcttggaagaaaagcctggcatattggtcccttatctctatgcattaaagacgcagaagagaaagcacgtagaggaaaggaggcatctattgatgagcatgagtgcctgaagtggcttaacacaaagatacccaattcagttatttatatatgctttggaagtacagtaaagtttcctgattctcaacttagagaaattgctaagggtcttgaggcttcagggcaacaattcatttgggtcgttaggaaaagcggagaagaaaagggagagaaatggttacctgatggatttgagaaaacaacggaaggtaagggactaatcataagagggtgggcgcctcaagtgttgattcttgaacacgaagcgattggcgcatttgtgacgcattgtggatggaattcaacgttggaagcggtgactgcaggggttcccatgatcacatggcctatttacgccgaccaatttttcaatgagaagttggtcattgatgtccttaaaattggggtacctgttggtgctaaaacatggtttggagtgcagggagatagtatttcatgggatgcagtggagaaggcagtgatgaggataatgacaggggaagaagccattgaaatgaggaacaaagcaaaggtgctatcacatcaagctaggagggccatggaagaaggtggatcatctaactctgattttcaagctttaattgagggattaagttcattgagccactgatataccaccatctacactatgcatgtatttactctgaagatgttttgttatctaaatttttatgatttaagctagaatagtttaaaatctgtcgacctaaatttttgtttatccgtgaaaatcaaagactatttataagaactcaatcaacttaagtttaaatatatttaattcctcataatcatattatattataacattgttcgtgtattttttttttccaaagtctacgattttttaagctagccaaattacacattaatgcggaggtcacttttgtgggtgaggttgtcgtgtaatctcagtcagaattccattattcagttagaattatggactatccttcatggagtgcgattagctagtgagcctggattcaataacattaagaaaaatatttcttaaataacccttgaattatatatatcttgagagaaatgaagagatgagagataaataattaatttaattaatgatattatactatgagaagaaatatatatatatatatatatatatatatatatataaaagttattgattgagcgtttgaaactgacattctaacattaatgtccattctgattttgttgaaacagtgggcaaaaaaatgaacataaaacacaaggcaaatgaccaaaaagttcatttgaccatatgtcaaatttgggcgaaggtgaatagcatcttttgaatcaaggagaagaaaatgagtcaatatagcggaaggatgtgttaaaacttaaaatgcaaggtctaaaaagatgattcttttttttatcctgaaaatcaaagagaagaatcaaaaagtttataatatttttttacatttatttaattaattgagttagatttttagtataaaaatgatcttgttaacttaatatattaacctttcttttttttaattttttttttcatccctataaaataaaattcctcttgttttatatatgttaacttaatttttttagttctctaacttatatttaatatttaatttaattttttaatttattaaatttaatttgatcttctaattttttaatttaatttaatttaatccttcctctaaatggtaagaaatcacattttgtgtcaattcaaaactatatgattttaattatcacaaaatgtatattttaaaaaaaatgaattaattaaaaaaattagaaaatcaaatattgaaaaaataaataaattaaaagatcaaatgggattaattttataaattaaaggattaaattaaacaaaaaattaaaaattaaattaaaaacaaaagaaataaaagaattaaattaaacttaaataataaatttgagaaaaaaaataatttaatctatatatatgttacctttctaatttttaatttttattcattgagtttaatattttatcttttaaaagatttattttggtcatgcttttaaaaagattcactttaatcctttggacacatctattactttcactgttaaaataatttaaatttgcatttgtttaacgtataaaacggctaataagttgtttttctataaataaaagaaaactagaagggaatggaatcgctagatacacgatggaagacaagtaccagagctacaaaaaagggagaagacagaagaggctccactgagtcataggtagagggttcgtctgttcgtggttgtgcaaagcttttaaaatgggcgaagctatgttacgttgcaggttcggggacatgatggtttgcgttcaaggatttcaatcccttctccttttaaacacgaagatgctggtttgattttacactaaatggatatcgactttagtcaaatgtgatgcaaaagctttattctaaaggcttgaaacgatacttgactccattatttagaattatgtttccaactcatatctaaacatcttgaccaatgtaaaaatcatgtttcactcattctggtctactctagtcatatctttcaaacgctaataattcaaacatgctactaggttatgcttgatattccgtttggagtactatccaaactcagcttaaatattaactcagatttcttacatgcttggttactctaattaaaaagtatatttgtatcttaaaattttatgtaaaatctcaattttatataaaaaaatttaagttattttcacaaacttaaatttgtaaacttaaacccaaaatacaatattcttaccgagtctaactgcatggagctggtaaatgttcttgagtcttaggtggaataagaatatcattgtccagatcaaagaaatcatggactagaattggggtttactctatggtgggataacaagttaagtggtccatcactgcaccaccaattttatttgttaaaagacaattttttccttgaaattttttagctaccacatctttttctctagtgattaaagagaaaataaaaagaatatttgtttttctaaaatgattatttttcttcattttctttttaactaaaacaaatcgtatcaatatatattttcttttcattgctcctttctcagcatagacaaaatgcaagtaaagcaaatcaagaagagaaattggtcttgacttgacacgaaaaaggttaaccaaatgtcctgctaaccatgtgccagggtgccaccaatcaatgctgcaaccttccgtcaaattaattgacacattgattaattaacatgcaacttcttccaaacatgcaaatatcttcaaaagatgggtgtagagaaacaattctcacatgcttcccacgtgttctatttataaagaacataaatgtccaactaaaatgttggtaatttaatgttggatccaatccttcctctcttactgttggtgaccacaatctttgaaccagttacgacccacaaccattccctcaatcaaagataaacatccactatccgtgattggaccttatagctgagcccaactacaacttccataacagttgccccatagcccggttatcaagcattcttggtatccaggatgtatcatcaactcacctttacagagatgttatatagaaacatgccaccgtggtactttctcaagtcgtttcaagtatagaatttaggtgttccatatttttaaaaaataaaatatacaatacacttaccgggttgatcataaaccggggtgctcatatatctatttaaaccaaaatatccacatctttttactcttatatcgcgagattctgatgccacgtcatcgcatctaattttcaactgcattttgtgctttaatcattactttaatgtctcctttcctgttttgcccccagcttttgactattttttacttttctaccctcctgatgtttcattaacgccagctgtcatatgtgttgtttcattttatgtggcggttacactttttcttttatatttcaaattttttcctcaaaagtcacttctttcatttcctctctgtgacaagcattctgccttcccttttctctaattcgtcttgcattcccttctctgtattcctcatctttcagttcttcaacattttcgtgcacaccaggtatcttccttttcatctcctatatttatgatttcagtaacattcatcttctaatttatcccaataacgtatctttattctttttttaaatattcttgtttctgggtttctgtacattcgttcctgaatatctgggtttcgttcttgagagttatcatttctatatttcattcttctgcacctgcattcttgtggttcattttctgtttcataatgaaacttacccctgaagaagagaaacatttgcggaaaactgtcactcccaaagttgggtggtggttttttggcctacctctttcagaagaagaaagggaaaaaaaaaccttctgcgtggttacactgggggttcttcatcttccaagaaacccaaaggtcctaaatcccttaccagaaatactaccaaaccccaacatgattctcccttatcaccagacccaagtaatccccaatccaaatctagggattcttcaaatattaggaattctgacacttctaatcctagagttcactctatcaccgaacacaaacaagtcaagaatcccatgaagggttcttctcttggccctcattcttcctctgcgggttcacaatccaaatctccctctccgtcttcggacgattctttcgaaatctggtatgaacttgttttgactgtgtttctgaaagcactcattacttgcatcttgggtctgaccgcatggttgatttgatactcggatcatgccgacataaccccatacttgttcctaaggcaagaactagactccaacccggagaggcggagctgagattactttcccagtcagccactcctgccgaggtctctgttttaaactcttttatgtgttcatctaaattttcaccttcaggtatgctttattgatacttctcgtctttttattaactgctgctgaatcaccatcgactgggtcccactcagataatcctccccccttggcctccaagttcccttgggtcacccatgaggtgttgagcaccctatctatccttgagtcggcactcatcgccgctgttcccgtaggaaacccagatgggttcgccatctgtgctcccaacccagatgaacctatctgtgctatccgagaagggattgatcccaactttttctttttctataaagatgtagtaacccaattaggagtccgctttcctttttctgcctttgaaattgaagttttaaaccaccttcatatagccccttctcaacttcaccctaatagttggggatttgtcaagacctttgaactattttgtgaagacttgtcaatcccctgcacagtaccattattcttttattattataatgttcataccggcaggacgggtaaggaacctcccaacaggaaagggtgggtttctctccgtggtcgatccaaatgtaaactatttaccccatataccgagtccttcaaaggttttaaggacaaatattttaaggttgttatcgaacccggcaaacaacccttctctttgttcggtcccaagtcgactgaggtggaatggaaattcccactatactggtccaaagctcaccatgacctttcgagcgcatcctaccgatttgccgaagaggatttgccagattcggatgcttcttcgattttttggattacggaatatttagatgctcacggtccgcccaacccggcaaattatatccgcagccttcgagtcggattatcgacccattctagtacgaaaatattatagttattgttgtacaatatatatgatgattagatctaaccatctagttttgtttcgcagctgacaacatgggccctcaaccatcttcaacttccaagcccgtatatgctgccgctgctgactcggccgctcgccccccgaaatccatggaaaccgggtcttcggcacaaaaaacttccggggcccacaagtctgccgagaagagaaatactactgttgagatagccggtaaataggctccgacctccaagacaaccaaggccaaggccacgtctacagaggcaacaaaaacccaggttgcctcaactaaagcggcaggtgccaagacggtgcagcctttcaaacgggccccacctccctctttccggatgactttggagaaaatgaagaaacacaaagtcgtttagctaaggcccatggttcaacaggaggcaatggacatgcgtatcttgaacccggctgcgcaacctggcactgttataaggatgcctcccccactgccagattcttcatcctcccacccccgcactaaggatcctcatcccacaaccgggaatctgtgggagaaaggggtgatcggtgagcttttcaagataactaaggctcccgctcacttccatgactccagtcgatttgtggatgaggattatgaagagctcggccgcatcgaagagaatgcttacaagtgcgcttctttagtacaaagtatctcatctttaaagcacaagtacaacatctcggcagaagagcttgaagcttcccgagagggaaataaaaagatttatgaagagcttctttctgcccaagtcgagagtaaaaagcttaaggaggagcttcttgccgcccaaacttccaatgcttccctccgcactgatttaggctgggcacaagccaacttggaggctgctgaccaacaagaagtctggcaggcgaccagcttcaaagatcttaagactcttttttatcaaagggagttggaccatgcccaaatcgagaataagttgtgggttgctgaggaagagattacgtcggtaggggacacgttggccttggcggtggaggactcttttaacaataccctagaacaacttcgctgcttgaacctgggtattgagttcaccaccaacgggatgcactacctagcttatgtagaagacgataagttagttcctccttcccttcctgaagacaacgtgattccaatggatgaagatccggttcccgaggaggaagcgacctctacctgtaaaccagacgaccacccactatcttccaagacccgaagggtcgggatgccagttttatttgtaaaaagtttttacaagtcttcgaatattaccgggttcaatcccgaatcacattacaatttttgcttttatttactcaatgcattagaatttttcatcttaatacattttcattagtcgtgaatcgaatttttattattcgaccaaattgttcttcacgtgcggaataaatatcatcttggttccaacggccaagtattatttatacagatttgtttctgtaacgtactcggatacttacaatgatcaacttgctgaagagattacgttgattgggcactccctgtttcaacctgatcgggattgaccagcgcatcaatccttgtcgagatatccgcttaacagaattttctagtattattttaagttttaagacaaccatatgaatctcggcttaccgtgatccatactttgcataaaacacgcacaataatactgaatgaaacattttatttatatcaatacaattgtattacaatgatatgactattttgaatgagaactgtatgatccaagatttgtaactttcattctcagttcatattctcaacaaaagcaaaccatgcactccttacaactgcattacattatttatatttgtgatctcaatgaaagagaaccatataatcccgggattatcaatgatgatatcccggctcatactctcaataaaagagaaacccacaaaatgaaagaaaataaactataatttgtgatctcaatgaaggagaaccatatgttcccgggatcatcgatgacgatatcccgactcatactttcaataaaagagaaacccacaaatttttacagaagggaaaaacaaaataaagctccttgatggcattaactgtagtatctcttaagtttgtctgcattctatgttcgtttgacagctttcccttctaacgtctccaacatatatgctcctcgaccaagtttttgtgttatccgatatggtccttcccaattagttgctaattttccatctcggggattcttattcccgatgtccgctcttcgtaagaccaagtcagcttgttcaaactgtctcgggataaccctcttattgtaggattccgccatgcgttgcttagctaatagatcacgggcatgggtaataactcagacttcttctaacaaacttgattccactgctaatgcctcattattttcctcttcacctttttgtagcacctgactatgcctccatgatggttgtccaacctccactggtatcatggcctcacagccataagtcatcttgaaaggtgtttacccagttgaagtttgagccgtggtttggataccccacaacacatagtagagttgttctacccaattcaaaccagcatcatacatccgcttctgtagaccctcaataattactttgtttgcagcttcaacctgtccattggattgcagatgttctactaaggcaaaatgatgcttgatttgtaacccgaccatcatttcttgaaatcgcctatctaggaactgaatcccattgtcagtaatgaccttccctgggatcccaaatctggccatgatattcctttcaaagaatctctgaattcgggctggcgtgatagtagccaatggctcggcttcaacctatttggtgaagtaatcaactgtgactaccaaccattttaactgtccctcagctgctttgaacggtcctaacaagtccatccatcacttgaaaaacgaccatggtgttgaaatagactgcagctcctccagaggggataataacctagtagcattcttttggcaactctcacattttttaacatgagttgctgagtcagcttccattgtaggccaaaaatatccgtcgcgcagggccttccgggctaatgccttagcccccatatgttgtctgttaatgccctcatgtatcttagacaatacgtattcaacttgatcagactttaaacagattagcatcgatgtgtgaagtcccctttgatatagttcattaccgacaattgtatacatagctgcacttcggaccaacttcttggattcgattgtaacatctggcagtatcctttgttccaagtattcaatcattggccatctctaatcatcttctgttagaatcaccatcacacaagtcaaatgcaaaacctcctgttggactacggtccgattattacccgggcttttggtgcttgctagcttggaaaggatgtcggccctggtattctcttcccttggaatatggctgacctgcacttcatcgaaatcaactataatttcctttaatctgttcagatattttactaacagtggccctttgacttggtatcatcctttaatatgggccataactagctgtgaatttgtgaacacctttatcttccttgcctcctgctcctttgcctgtaataacccggcgatgagtgtgtcataaccaattttgtttgggtaaatacaaaataaaaaaagagagagagaaagaaaaaataacaattatagaagaaaaaagaaaaaaaaaagcaaaatgaaagaaaaaaatagataagagtttttaaaataaataaataataaagagtagtaaataaaaaaaggaaaacaaaagtaaataaataaatatacatataacagtaaaataataataataatatatatgtaaacaaaaagaaaataataataataatagtaaaaaaaaaagaagatgacaaaaagaaaaaaaaaagcaacaaagagcaaaaagaaagaaaaaagagccataaggcccattaggtcatgaaagggcaacgtaaaaggcaaaataaaaggcacaaatgaaagagtgaacggaggagaaaaagaagaaattaattgcagccgcatggatctcggagttcaaggattggccaatccggcgacgccatttggcagtgggaccagagtagaaagagggggtcttttgaggtaaccttcattctctcttccctcctcttcattctctcttctctttccctttctttcttttttttttttttcgttttttagccacnnnnnnnnnnnnnnnnnnnnnnnnnnnnnnnnnggccaccgccatcgcgtccagccaccactaccaccgcacctcaccccaaccaccgtagctcctccatcaccaccatgcttgttccatgttttcttttcttcccctttctttttctttttttgttttttctcccgtcaccaccgcggcccaccaccgcaccaccattacaccacctcgccgccgccgtgctcaggccacaccacggtggccaccacaccaccagccctcatggtggtggccttaggaagccatcaaatccctttcaatagccttaattttcgtgcagttgctggctgctgtgcccatttgctaagtgtgggttgggccgggtcatcccgactcggttccaacccttaaaaaaaaagggcttttgctttttgcaccccagatttgataaatacaccccctaaaaccaactaaataatgctttctgcacacccagattttcataagcacaccctaacatataatgttgattgcacatttcttttcataaccgcacatccctaaactattgacccagtcctattctggaaagtatgtattactgtttgaaccacttttttataattgcacatccccttgctgttgggcctgatccacttttaaatacaacatgaaatactatttacactcatcctattcataactgcacacccttagatattgggtctggtccactcggatgcatcatatgcactgctgattacacctcccatgctcataaatgtacccatatctgctgggcctagtccatttgtgtgatttaatatgcactgctgactacacccccatgttcataaatgcacctatatctgctgggcctagcccatttgtgtgatttaatatgcgtcgctgattatacccacttttgtactgtatgcacacctaattactaagtgtacccccacttctattttatcctttttttatttctatttatttgattagttaatgttatgttaattgttaattatttttgcattagtacacgcttgtgttttgtgcactccatgctgggtctccgacttgcttgatagtgtttcaataacacgtggatagatttgtgaatatcatgctgagtctccgacttgcttgatttcataaagttaccacaaattcaaattcttttctaaaaaagcgaaaagtactcaaatgaagaatcactcaattccttttttcgaaattacaaattactcgagattgcttcagggcaaaccccttgttgacctaaaaaattaaaaaaatatataaaatcttccctattctaaaaaataaaaatttgattttattttataaataaacaaaaataaaacaaatataattcatgttcctaaggaaaaacaaataattaaaaagtcactttatttttaacacactcgattaaaggctcccgtcttcgtgacgaacgcgtggggtgctaacaccttccccgtgcgtaaacgactcccaaatcctttttatctaaaatcgtagaccatgctttaccttttggtttttctgacgttttccttaaataaacgttggtggcgactcccatctagttttcccattttttgggaacttcttaatttccctttttcatcctcgtctccgtcgtggctggataggttgcgacagagtgctttgtgcttcatacttggcctgattgtttgaagttgagaaatttaactgcagggagtattcaactgccacgccatccgggttttcaattataattccggctctgcttcctcttttattagatgatccatccacgtgtaacttccaccaattatctaccacggctatacttggtgtgagctccaataagaagtctgctagggcctgagacttaaagggttgtcgggcttcatactttaaatggaactctgatagttgaatgacccaatttatcattcgtccagccaaatttggcttgtggagtagctgccgaattggttggttagttcttatcacgatggtatgactttgaaagtatggtcggagcttatttgcagctgttacaaaggcaaaagccaccttttctaacttctgatatcgcaactcagagtctcggagagctcggcttacaaaatagacgggcttttgaattttgtctatttccctaatcaaaaccgcactgactgcttcatctcccactgataaatatagaactaacacctccccaggctatggtttcgaaaacattggcggagaagccaaagacttttttatctcggcaaaggttacctcacaatcagggttccatcctatcacgacttccttctttaacaacttgaaaaaggggagagctttttctgccaatttcggcataaaacgtgtcagggcggctattcttcctgtcaactgctggatttcctttttatttgctaggaattgcatatccaacacgactttagacttatctgggttcgcttctatccctctatgagtaagcatgaagcctaagaacttcccggccaacactctaaacgtacattttaatggatttaagcgaatattatattctcttaatctgttaaatgtttcctccaaatccgccacatgatcagtctcgtcagctgtctccacaatcatgtcgtcaatataaacttcaacgttccgatcgagctgaggttcaaaatgaaaatgaatagaatacttcaaatacaaccaagagggggggtgaattggttgaaccttggtaaattaaaatttcaaatcagagtttttccactagatctttatcacttaaaacttgtttcaaaaccaagaatcaatattcaatcaaattccttttccaagaagaatagaaaacagagtataactttttatgcaatgaaattgattcacaaacaaaacaattaagagatgaatagatgcgaagaaagattagccacagatttttatactggttcacttcaaacactatgaagctacatccagttcttccactcaacattagagtagagttccactattgcaaaaattattcttacaagcaaatataagcctctctttatcaaccctagataaagttcagaagtctaaaacactattagacccttagagaccaaaaacccacactgagaacactaatcagttgtccttaaagaaacactatctctagccttgcaagaaacccatttacaatagactaatctttacagaaattcaaacaacagttttacaccttcaaagaataaggaaagatatcacctgataatccaagaattcatgcacataaatgattcaataggttgattgacagattactaactcaatgcattcctttccttatgctttgatgaacaatgatgcttcacttctttgaatcaaacaatcatactaatttgtgaagcctaagaatgtttagtaactcagaaaattcactaatgaaagctcaagaaggtttgtgattgcccagaattcgaaatctcaaaagttacaaccctcagaataatgggttctatttataacagttttctaactgaaaataatcgattaaacccgctctagtaatcgattatttagcatatgtaatcgattaaatcaagattgtaatcgattaaaatgctcctaataagttctggatttgagctatgaacaatataatcgattattccgtgaagtaatcgattaatctaattagtcatgattttctaaatactctttgtaatcgattatcacgatgtgtaatcaattaagacagtagaccatgttttcctaagcatgcatgtaatcgattactgattgctgtaatcgattaagccagagttccatttctcataaaaagcctgagtaatcgattaatccgatatgtaatcgattacaatgttctttgtttgttttctgaaaggcacgaagaacaaaataatcgatgtcatagcctttgtaatcgattaatgcagtaggaacttatttttccaaaaactttgttaatttaaatgcctttctatttaaatgcttttactaagatctttaatctaacaatcctagatgaatgattcatgcatgatatgctcaattggattatcagattataaacttccttttacattaatcaaattgatcttcaagcttttcttggaacttttatccttggtcatgttgaaagacaaaatacttgaagcttgatccttgttcattgatgcctggcttcacttgaatcaacacaaaaaccatattcatcattctctgatatgtggccccgacattcttcaatccgaaaggcattacattgtaacaataatttgccttattaccgataaatgtcgttttctcctgatcagccgggtacatggcaatttgattataccccgaaaatgcatcaatgaacgacaatagcttgaacccggacgagttgtctactagctggtcgatattcgacattggataagcgtccttggggcacactttgtttaagtcggtgtaattggtgcacactctccatttcccatttggttttcggaccattaccacgttcgaaaaccatgtggtatactgtatttcccgtatgaagccatcttctaacaactccttaaatatgtgattgcaattcctgcgcccttttcgggcctaattttcgtttcgtctgctgcaccggctttgatcctggatacatagacaacttatgacaacagaatgtcggatcaattcccactatctcggatgccttccaagcaaacacatcctaatttcttctaaggcattcaataagttgtgctttcacatttggctccattgacttccccactttagtgatctggtcacgttgggaccctatctgtacctcttcaatatcctctgctggttccggcctccattcttctgatccttccctcatatccaattctaccatatttactggtttcccagtctgctgagcaactttatcccagcatatgggatctccttcccgaattcggggcggacacgtcggaccaccttcactttttcggacggtgttgtaataacattgtctagattccttctgatccccgcagattgttaccacttggcctttgttacccacaaacttaatcttctgatgcttggtagacatcaacatatcccatttatgaatggttggtcttcccaatatcacattgtatggagaaggaaagtctgctgccacgaatctaactctttccgacttgaaagcttctttagtgcctaatgtcatgcataggtcaatagatcctttaatgctggtgttaccaccattaaaaccaatcaacattgttttacatggttttaaatcctcttcacctagattcattttcttaaaagcgctccataaaattatgtcggctgaactgtcattgtcaacgaacatccttctgacccgacagtttaccaacgttcctgtaatcacaagtacatcttcgtgtcccagcattactccctccatatcctcctttgtaaaatataacaaaggaggttcacgatcaacacttcttcctttaaattttggctactctcttactgaaagaatttctttcaagtattttcgcctctggctggcagtatctcctcctccgcccaacgctcccgaaatcacgttacattcaaattcgggttccggaaatccatcatcttcatcacgtgtcttctttcgctcctcctttgctcgtctaggttgagcttcttctctttttcttttatttttccgcccttgcgtatttatcacatattgtctcaatcttccttctctgataaacttctcaatggcttcacgaagatcccaacattgattagtagtgtgtcctgatccattgtgaaattcacaaaaacgggatttatccaccccgaccttgttgtatataggtcgaggacgttttaccttcttcatatctgtcaatgctacttttctccaaatctgagaccgggatacattcaatggagtgtattttttatacttgttttcgtatcttctcggcctatgctttagttctgcattcctattgtgattcggattgccggggtgttgctgattctttggcaacgggcttcttctcctgggacttcactccttttctcggcccggagcatttgcaatctccatctgctccaactccaaatatttctttgatcgagctcgaaattccatcaatgacttcaccgggtctttgtaaatagattttgcaaatctagaagatccgtttaacccggcagaaataaggtaaacatgaacctgctcttccaaaccctgcacctgcaatgcagcttccttaaaacgatccaggtaactctgtaacgtttcaccaggtaatttctttatctttccaagtgcaaactcggacttcggttgtttcttgctagttgcaaagtttaacaaaaacctttgcctgaaatcttcaaaattttgaattaaccgtggaggcaaagtgtggaaccaagtttgagctgccccggtcagagtagtgacgaaaatccgtgaaattattggttcgtcaattcctctgacgcacatctgcaaatcaaactcgtcgatgtgtacctggggatcctgggttccattacatttggataggaaagaaccatcaaaatcgtccaaataccgagcgttgactatttcatcaacgataggactactgttttgctggcctctactgtactttcttcgatatattggtccctcttttcttcctcgggacgtggcctccactccctgatcacaatctttcattactaactgatgaattgggcgctgaattccgagatcatcaaactgattctgcaccacgggctgcacattctcaatactcctttcttcagtacattgcggctcctgattctgcacatgttctcaaggtgtgcctccggcttcaaatcggctaccgggttgctctgaatttttgggctgatttgacggaatcattgaagcctgacgtatctgtggtctcccctcatctcggtttccctgatcgtctagggtctccatactcctcaaccgctactccatccgtagcattcgttgagcctcctcacgcctccactcttcattacgttccttcatctgcagggtaatgagtctgatgtcctcctgtagttgaaggcttgtcttctttccatattctcaatacgatttaaaatcgaattgagagcattgttaacgaacctctctcccaactccatctcctgaggtgctgggtaaatcagatttcttctccctcgttcagttggaacgggagatgaagcggaatccgaaactgcctccgttacatgcacttcttcacgtcgctccacattttgattctctagcggtaagatttccctgcctggcatctcagaatgtggtggtatagactgactgtttctaatatttaccattgtgaatcgtgggactcgaattttatcgtccccacagacggtgctaatgttctatttataaagaacacaaatgtccaactaaaatgttggtaatttaatgttggatctaatccttcctctctcactctgaatatatttattgagagcaaataatccagagaagatgatcacagtgctttgaggaatacaccacaattgacgtgggggtgtgtgcattgtgtgaatggaatagagaaagttaaaattatgcgtaccttctctattgaaactatcctctatttataaaatatgtacctcataaccaatcgtgagccgttcccaaatatatcgaagaatatcctaactgttggtgaccacaatctttgaaccagtcacgacccacaaccattccctcaatcaaagataaacatctactatccgtgattgcgccttatagctgagcccaactacaacttccataacaccaccaacaaccatcattctacttcacgtttctattttccgaccaacaaccatcgagaaacaattaactgatttatgactgtttagatgtaattaaatgttgtagtaaatatagtattcgaataaaaatattaaacattgtcgtaacgacattagtatattcaaatgataatacttttggatgtgataatgatattataaggttaagtgtatgtgtgtgttttttttataacaaggacgataagaggatcgaatcttagtctttttatgtatctatccaattctaatcattaggctaatcctaatagctctatggcaaagtttaacacaaaaaatacaaaagaaaaatatttatcatatatataataacgcaattagtgaatttctaatctaattgtgggacattatttatgtgaaaaatgctgatagcacactcttttaaatgcattttttttattattgataattaattttttgatatcacttgtgagtcttgtttgtgattttctaattttcaataacttttcaacaaattatagaaagtatgttaaaaagaatttgtatctatctcttctcatgttcatgttatacataactctatttttattttttgaactagttctacttatgtaataccaaacctgctttgctactctttttttattgccctcaattcatttctcttacaatttaaagttcatttattcccctcaactgtatttccttttttctttgatttaaattcaagaacaaagagttgggaaacaactgccacgtgcaacctccattctactaattcgcgtttctatcccccatcctccatatattttccaactcataaatcacaactcaaaaagtccacacttatttttatgccttttgatgagttctattaaatacttcacactctaaaaccaaaaggcaaaaatatccatactagaatccctttttttccttttcttattacttactaaacagttctagttcaagtgcaaaagtttcaccaacttgcttactttactactgaaaaagatgagcaatgaagttcattctttgcatgtattcttcatcccattcttggcacatggccatatcataccaaccatcgacatggccaaactatttgctgaaaagggtgtgaaggccacaataatcaccacacccctcaacgtacctttcatcttcaaagccatcggaaaagctgaatccgaatccaacgacaacaacgcgatccatatcgaaatcatcgagttcccttatgcagaggttggtttacctaaaggctgtgaaaacaccaactccatcacttccatgcatttataccctgcgttcttcaaagcatgtgggttactacaacacccctttgagcaacttttgcttcagcaacacccaaattgtgttgttgctgatgttatgttcccatgggctactaattcttcagcaaaagttggagttcctagccttgtgtacgatgggactagtttcttctccatatgcgccaacgaatgcacaaggctctacgagccttacaataatgtttcttctgattcagaaccctttgtgattccgaaccttcccggtgagattacaatgacaaggatgcagatgtcacctcatgtcatgagcaataaggaaagtcccggcgtgacgacattgttggaggaagtgaaagaatcggagctgaaaagctatggtatggttgttaatagcttctatgaagtcgagaaggtttatgcagatcatttaaggaacaatcttggaaaaaaagcatggcatgttggtccaatgtttcttttcaacagggttaaagaagaaaaagcacatagaggaatggacgcatctattaatgatgagcatcagtgcttaaagtggcttgacacgaaggaaccgaattcagttgtttatgtgtgctttggaactacaacaaagttaactgattctcaacttgaagatattgctattggtctagaggcttcaaggcaacaattcatctgggtcgtgaggaaaagcgataaagatggagttgatcaatggctacctgatggatttgaggaaaggatggaaggtaagggactaatcataagagggtgggcgcctcaagtgttgattcttgaacatgaagcgattggcgcgtttgttacgcattgcggatggaattcaattttggaaggagtggttgcaggggtgcctatggtgacttggcctattgcttatgagcaatttttcaatgagaagttggtggctgagatcctcaaaattggagtacctattggagctaagaaatgggctgcaggagttggggatactgttaagtgggaggcagtggagaaggctgtgaaaaggataatgattggggaagaagcagatgaaatgaggaacaaagccaaggggttttctcaactagctagacaatctgttgaagaaggaggatcttcttactcagatttggatgctttaattgcagagttgggttcactctcctactcaaatgagtaatgttatagtttcttatatttttctactaatcctcccattgctctataaaataagtattaaataaaaaagaaaatgtatttgatttgttagagcattttaatggagaagttttaagtgatgtgagcttaataagaattgatacttaataagagttatgtattggagagagttcttaaaaagtgtggatgagtttttagtaagtgtgggtgaaataccaaatgtttacgtaagcacactgcacatttgctaaaattgtttgcagccctgctgttgctaataaagcagtaatactaataaatatagtaggtaacggttggctagactcccttgcattcccgtgtttagagtatttttagtggtagatatcaaattgagatcttagattactttttggtagaccctataatattatattggattaaagatctctcaagacttcttcaatttttttaatggtagatctcattttgagatattagggagagagaaaaaagaaattttttttttaaacaatgtgcagatcttaagagatcttctacaaaaactcatcctccatggtggagatctcttcaattcctttattaaaagatttagtgaagatcagattttgaactcaagatctttacttaaaatcttacattaaaaatgctcttacactcttaatatacaccattgaatgcttggattgattaattgagatatggttattctaacttattaaaatttcaatggcataaccctcaagtcataactaacttttctaaaatactttatagctcattcttttaatgattatattcataaccctctcaagtgaataagtttgagagcctactatatacaacagactaacactactttaattttttctcactaacggtatatgaaataaatttttgctaccaacatactcacttattgtgcatgagtattgaagcttcaatgtgctaactcctggtatttcaatgttaacacacatcaagctttgttctacaattggtcttgaactgttccgagtcagatttttttgcttttatgatttagaaaagctacacacacgtgctatgaatgtttcctcggttaacttgcagtttctataatatcaatcaatcttgtatatttttttgagcatttgtcttaatcatataatgacatcaacttctatttatatatgtacgaaagcatatccaatgaagggtctccaagtatgatataacctcttttttatttcgaatatgaatataactaaagttctccgtgggtaactgcattttatctgtcaccaaaagaggatcaaagggtaatacacttctattccatttcaatcagttgataagtgcatttttattgagataagtaatggattcatacggagtacatcatacttttatgaaatcgatagaacttcaaactattttagttcaaatcattgaaatttagataacagtgcaaaacatcttcgacataatcttagtgttgattttgggctaattagtggctcaatgaacttaactcctcaattaaagctttcaaatcagagtacgatgatcctccttcttccatggatagcctagctagttgtgaaagcacctttgctttgttcctcgtttcaatggcttcttcaccgatcattatcctcttcacagccttctccactgcatcacatgcaatactatctccatgctaaggtatttgtgggtcggttcggatcgattttggccaaatttaggacctaacccaatcaaaatttgaccggttcgatatttagaaaaaaaaaatttgaaatccaacccattcataatcggttcggttcaatggattacccatttatattttttttagaactactatcttatatcatgattttttcaaatatccaatacaattaacaatattatcaaatgtatgaaaatagtaaaattgattcatttaatatcattaacataatattttaaaatagatttataatataaattaaaacaaaagattcttgaacaagatttcctataataatctgaatcacaattatttctcataaatcaagctttgttataaccaaatttgttgtaaccatatttgctgaaacaaacaaatgaacaaaatgatttattaatattataaacacggtaaacaaaataaacaaataacaatatacctgaaagtaatacattaagaagttccattacttacagtttcaacacttggagacccaatattagcagtatttaaagtcaaatcaaacaattctaaaaatttaaacataactctattaacacaaaaattaattgatatttcatacaaatataaaaaatgaaataagggattatacacctaattcaatcttttccgcttcatttatttcaacttgcaagtcattaacattttgcttagtagatctaagccaattttggacacaaatgagagcttcaacagtagtaggactcaaggaactacgaaatgaatccagaattctaccctctgtactaaatgcaaagatacatgaatgaccaatatatccctagtcatacaggaaacaatataatatttggatgccttcaatttccaccaattcaaaatgtcaaactcaaggtgattatcttcaacatcatcctccaaatacctatctaatatgtttttttgcacctcactctgttttttcttaattttcattctaaattcatcatcccaatcatgatccttatcacctttgtcatcattatgttgtgagaccatgtttgaagccaatgtactagaattagctgagttgctactagaatgagaaatgagatgttctagtacatattgctgaatcagtttttaaacgagatttttcaattttttcatcatgtccatgctcttctcaacatcatacatatgattaaaacaaaattggatgtactcacatttataacgagggtcaaggtaaatagcaacaagcaaaagatatttaattccaccacttttccaatatttgttaaactttaactgcatacttgttgtcatcctttgtatcactatgtcatcattatgcctccacttatttagtgatttttgaatactaactagcttcttaaaaaagtgttagcagtaacatgcaatgacccagaaaaagaaagagttgtatcatagaaagtcttcaaaaagttaataaaaacacgagcacgttgccaatcaatctttttgggacatccttccccttcactggatatgagatttaatacatatgaagcttcaacatactcatagcgataaaatgcatgttcatatttttcagcaacatctaacatcaaataagttgagttccacctagttgatacatagagtattaacatggccttagtggatacaattacttcttcagcacacctcttaaaacttgcaaatctacttggagaagacttcacaaacttacatgcaactcttatttttctaatggataggtcaatttattccaatccatcactaacaattaaattcaaaatatgagcagaacattgcatgtgtatgaactccattcaataaagtatgaccattccaaacactcaatgctctagctaaatatgaaatagccaagttattagcacttgcattatccattgttacacaacaaacttttgaaatccctcattcttttaaacaattctctagggttatccctatggtttcacctttgtggtcagcaatcaaacaaaatttcaatatttttttattcaattcccacccttcatcaatgtaatgagctgtcacacacatgtaattcatattttgaattgattttcaagtattcgtagtaagtgaaaccatttgtttatttgcagacaacacatgcttcaacttctccttttcatcattaaacacatgcatgcaatatctagcaatagtgacacgagaaggaattttaaatttcggttgagcatcttccatgaacttcctaaacccttcattttcaacaaacttaaaggcaagttcatcaatagtgatcatctttgcaagtgttattagagtccgctcttgattaaaatcaacaagttttatactaactttagtagggtcactctcactatcacttctagaaacaattgtcttttactttttatcaacctgcctatatggatttttcttacattgttggaacacatgtcttctcaagttagaggttccatagatagaactagttatagcatacgatgcattacaatactttcaataagccctgccatctttttcctttttaataaaatgttcccaaacattagaaggagatctagcagatttttttttttccttagctctacttgtgcagattcagtttgttgtccttgcccttgttgtggtggagtttcatgtccttatggttgtgaaaaaacttgtcccttgtggtgatggactttaagtatgacatggagagggagtgctaattggtggaattggagatgaataattaacactttctgtaccacttttctttttcaattgtctcattttcaaattctaaagaacctatccacaataaaaaaatataagtgtttaagtaacatggaccttgttcattgaacatcaaaagcaacttaaattattgaacaagatattctcaatacaagtcatataatagtagcaatatagacaaaattaaaaccaaataacttatatggaaaataataaattgaaaaaagaaagcgtattgcattaatgagagtatgagacctacattataagacatcaagaccggcacacttagttactaagaagatcacaggacatgatccatgcaattaaggaagactgatctcctctgtagccaaatcatagacttagaattgaaaataacaatataatataaaatctaatacaatattggttttcaaagtccataatagtcacaggtataacacggaagccagtaggatatgttgagtgtggcattttcaaaactgaaaacaaggagctcccagtaatggtgacatcatatagattagtttgaagagtaatactactatacaagctggattaaaccatggaaaggagaaaaaataaattctatccacaactcaatctttgcaatggaagaaggtatctagcctagtacaagcaaacatcacgaatcatacgcttagaatttagaatataatgcaattaagaatacaagaaaaaatcaaactactgaatggatattagagaccgcacatgtacatcaacagaatgatgagcataaattacaattaatattcagatgcacagaacaataaccttcccttttctgcatccaattttcacttcagcggacataaaaattgccaatttcgaatcaaacttgttcaactaatgcaaaagctagaacgagaagctaaaagcaataggctttgaatccaataaaaaaattaaacccaaaaataggagaatatctaaaaacaagaattatttgattgtagtttaccacaaacgcactaactcaacacaaaaccacaatgctgaatatgtaaaaacaagtatcagcatgttacaaggcatgcccaaatagctacctacctatcttggactcacaatagaaaacagtaaaatacaatataataaaaatatgtggtggattacgaaaccgtagaagtagaagggggaattagggaaaaggaaattcgtaccaaaacttgaactctgggaggcgttaaaccaaagggcgggatgcactcgatccaccaccgatgcaggatgtgggttgtgtcgatgcgggatgcaagagcgggatgtcgatcgcggagcagtggagcacttctgctattctgcacttgttttagtgtttaattgttttcacttttcagactctctctctataatttgcatgtgcctcaccactcactctcagccacttaatttttatcttaattttgatattccttatctatttaatttaagagtaatataacaaatttttttattagaagtgaagagttaagtacttaggcttaatattatttatttttaaaagccaaaattcaagtatactatttatctattaaaaatttgttatactacatgctactgcctaaaactattcataattctatcaaaattcagtagtaagtaaaatgttgtttctattaatgtttttgcaaaagaaacaaataaattgggtcatatgctaaactggggagagaaaaaaatttaatttttaatttttatagatatataaataaaatttatattattattatgtgttcacagatcgtatcaacggatcaacgaatctataaatctaaacctgtgacccaacctgtacatgatcgattttgatcaattcgattttgatccaaatacataaatgattcaacccaaataatttagataaatttggattcatagatgacccgtacccatgaacacccgtactcccttcaatccaacaacttaacaccaataggtgccccagttttaaggacctcaagtgaccaacttctcattaaaaaattggtcagcgaaaataggccaagtgaccatgggaacccctgcagtcattgcttccaacgttgaattccatccgcaatgcgtaacaaacgctccaattgcttggtgttcaagaatcaacacttgaggcgcccaccctcttatgattagtccctttccttccattcttttctcaaatccttcaggtagccatttctcccccttttgtcctgtcgtcttccccgcgacccagatgaattgttgtcccgacgccccaagtcccatagcaatctctcgaagctgagaatcagacaactttaccgcacttccaaaacacaagtaaacaactgaattgggtttttttgtgtcaagccactttaggcattcatgctcatcaataggggtgggcatggattggatttttaataatccaatctatatctaatccatatctacttaaatagattggattttaaatccatatccatattttttaaaaaccaatttggatttaaaatccaatccatttaagtggatatggattggatcatatccaaataaaatccacttaaatgttataatatttttttttataaattttagtaattacacactaaaaagtgaaaacttaacacttgtctacttgaacttgataagaattacttcaaataccaaatgtattaattaaaatctgcttaaaaaccaaaatctgttttgctccacttctcgcctttcttgcacaaggacacaacagcaacacatcaaatgagaaagaaaatcatcaataaaccccccctggcatagaatgtcaatggctaataaaacaaaagataccagaaaatactaaaacaagtctccatattactctaaatccaagnnnnnnnnnnnnnnnnnnnnnnnaatacttagatatattagctaatagccacaagccagctgctatcccatgtttacaaaatagttatcaagtttatcccttggagtaatgtgaatgtctttcatcatgcaataaaaaatgatggctactaatattagtgctattttatagccatcattctaggcataatcatgttttacatttttaatctgtttttctagaattttttaatcaaaaaacttttttcatttaagaaacagaaacaaattactgcaactctgcaagggttcttaaggttaacacattatactttgactgaaaccagactccacaaataaagcaatactggtagccagtaacaaggaggtttcattttgttttgttccattagataacgttgacccacccattctgataaaagcttaggaaatccttcatcagccctataaagctctacttatattctaatacctgggcttatattccaagttacaacaaaaagctctagttatagccttaaaggacaaaccacgttccattgcatcaactatattaaattattaatgacaaaactgtatgggggaagattcgagtttgataagcaatggaaatttgaaaaccatgttaatagaaagtagtaaatgaaaaagcaccaacattcctaagagagacagagagaatccaaacccatttcaacaaaataataaaatcaggaattctagcacagaactggtttcagatccagaatccaaacccatttcaacaaaataaaaggaataatgaaaggaaaggagagaaataggatacccggtttggaggaagagagcgaggtaagagtttcttcaagcttgagaaataggaacccgagcgacgctgggccagcgtgagagactgagaggaagttttgccaagctctgtggtgactgactcgtgagaggagcaaaacagattttggtttttttaattaaaatctgcttaaaaagaaaatggattttagatataaaaatagatatgaaataaagatgtggaaaaaaaatctggtccattaaaaataagtaaaatggactggaccaaagcagttattggatcccaatcagatataagatatttttgcccaggcctactcatcaatagatgcctcctttcctctatttgctttctcttcggtatctttgttgcaaagagataagggaccaatgtgccacgcttttcttccaagcacgttcctggaatgatctaaatagaccttctcaagttcatagaagctattgacaacaaccccatagctcctcaactctgattcctttgcttcctccatcaatttggccatgcctgttttctacttattattgctataaggtggcagctttgtcctttcgatgctaatttcacccggaagattaggaatgacgaacgacgacgactcagcgtcgttgtgaggctcgtagagttccatacacgaggtagcacacaaggagatgaaactatagccgtggaacacaagcctaggaattccaaatttggcagcggaatcagttgcccatgggaagaacatatcagcaacaatgcaatctggatgttgcttttctattagttgctcaaatggctcttgtaggaaacatgtggccatacagaaggattcaaacaaatcttgtgaagtgattgagtcagtattttcacagccatcaggtaaaccagcctctgcacaagggaactcaatggtttggatatggattctgttgtacttagttttggattttccaatggctttggagatgaaaggtgcattgaggggtgtggtgactatagtggccttcacacccttttcagcaaataatttggccatgtcaagggttggtatcacatgaccatgatcatagaaggggaagaagaaaatgtgtagagtatgatattcactactatccatctttttctctagtgaatgagcaaatctatataacttcgctctcaaacttgaatagggaggaaaaacacagtaatattgtagagaagtgttacatttgcctttggtttggatgtgaagaatttataattataggaagagatgctgaaggcataactgatacataattacatatagtatattgatattcatacacttcactgagagataagaacaagttacacaactacacgaggatttttttcttgttcttttatgaacatatgtcttttatgggagcaaaagctttttttttcttttcttttcttataactatataaactatgaagaacctacaaattaggcttgtaaaaaaaaacttacaaattagtccaaaacaaaatattccacttctacaattagcacctacaaatttctagaagcgagtatctccgtaaatcagtgttggtctgttttccacacgtgtcacattttctagaattaatgagtgagcagtgaaagaataatctatatgtttgctctattttaagatgaggagacgtgcgggatatgtagtatttttatttttttatacatcagatatatattaatattttttatttttatttttattatatcatattttttattatttatatttttcctcagtcaatttggtgttaattaaacttttttctcgtatgcatgagttgagttgaaggctggaagcagaagataaaaaaaaataatgatagaaaataatacatatttaaaaaggatggtttgtcaaaaaaaatgtaaaaaggattaaaaaacgctatacttataataaatgttatatggtgccaagtttttggttaagtgtcccaaataattaagattaatgttgttgaccatgtcaagtagggggtgtatcaccatgatatcaaactagtaactagagaacctttacttccaagaaaacaagagtttcaaagttttaacttttgcttgtgtgcattggaatccaaaaattattactccaataatgattttgattattctgagacgaatgatacaatggcacaaatatgactttatagtgttactattaactttcaacatatccgtcttgatttttaagagattccagaccacatcaaaacgaaaaaggatgttattttcggcctgtccttcatcatttcttcctctttctatcgtttcaaacaaagctcaaggatctttcacattgatgggtaaaaaggaaatcaataagctgataggaaattaccttggtttttaatctcttatcaccttaagcaggcaaaagcatcactaaatctcttcatggaaaggaaaccatgaaatggccaaagtttaacaactataccacctacgaataaatttcaactgataattgcttgacaactatgtaacctactatgtcaaaatccaccaggtttctttattttcaaaactttgcaaaaatttagcacatgttcaacttattagttacaaaagaaagtgtatgtttaagagtaagatccatataagtttgcaagagtatttcaagtcttacttttccaaaatttagtttttcagacagaattttattctcaaacatatttttagaaataaccaaacataatcctaaactgatcttattcccaaacatatttttgaaaccatcccaacagaaatccaaacatgcaaaaaaagcttttgcaaactatattgatggcttgctaacgataacacaattgtattgtaggcttatatgtcgaagtatttcagcgatggagcgaactcagctcttcaattaaagtattcaactcggagtaagatgatcctccttcttccacggctagcctagccttctgtgagagcaccttcactttgctcctcatttcaatggcttcttcccctgccattatcctcttcacagccttctccactgcctcccatttggtattatctcccaccattctaacccattttttgactccaacaggaaccccaattttaaggacctcagtaacaaaaacttctcatcgaagaactggtctgcggtgaccggcatagtgaccataggcacccctacaatcactgcttccaacctcgaattccatccacaatgcgtcacgaatgctccgattgcttggtgttcaagaatcaacacttgaggcacccaccctcttatgatcagtccctttcctttcattcttttctcaaatccttcaggaagccactctttgtcatcttcttgtttgtttctcctccaacttcagctcgaacaagagggatggattcttcacatcggacaataacctggacttggggctttgagatgtcatgaatggtctcgtcttcatgaaaggtcacatctcgacttctcacaatcttcttattgattggatcccaaagtctaaacccgaattctgttttcggcgaaccgagataaatgcattctttcgtctttgcatcaagctttgccctttcacctttaggaacatgcacgaaagctcggcatccaaataccttcaggtgattataggtcacttttcgacctgtccagacttctggaatttcaccttcaagtggtcgtaatggtgagagattaatcaaatcaacaatagttctaactacttctccccataatgatttcggcaatccggcattggatagcatacttcgaactttttcctcaatagtttggttcattctcttagcaagtccattcaattgtggagtcttgggggtgtcttctcaagtttgatcccagcttctctacaataagcatcaaagggactacgatactcacaaccattgtcagatctgaccaccttcaacttcttgccagtttccctttccatcatagcatgaaattctttgatcgattggaatacctggtctttagacttcaatagataaacccacactttgcgggaatggtcatcaatgaaagaaacaaaatactaagctccatccagtgatctctcagacatggagcaaacatcagtatggacgaagtcaagaatacacctctgttgtctaggttgatccggtctcacaaatgaaacccgatgttgttttccagctaggcagtgcgtgcaactctccagcacttggcccttcaacctggtcaatagttctttcttctccaatatctggagtcatttctcactcacgtggttgaggcgcttatgccacaactccaagctaggtccatctcggattgagttggcttctccaccattaatctttccttgcatcacatacaaggagtcttccttctttcctcgggccatcactaagcttcccttggctaatttccatctacacccttgaaagttgtttattaatccgacatcatctagctttcccaccaagattagattcaatcacatatcatgtacatgtctcacatctttcaacacaagtcggcaccctacatccaaggtcagggtcacatcaccgacaccaacaattttgttggtcacctgatttcccatcttcacagcttcgaagtctccacttctgtatgatgagaaaaaacctttgtgaggatttacatgaaaagaggcacctgagtcaacaatccaggcgcagtcatcaaaggcaatattcagaaaattatcttctccgagaagaaatatctcggcttcaacgttggcaaccaccgctgtggtgctcttatcttctttcttctttagcacaatttgatctctcttcactgtgccactctgctcatttttctgcagagtccaacagtcagtcttcttatgtccggacttcccacagtagaaacacttcagttcaaattttggccttggccggtctctggaccgatctcgtttgtcacgaccccagcccttgctacgaccttggaagtcagacttacttctgttctcaccaacattggcctcatacgcgttagttacacctcgttctcttctcttggcttcttcattcaagagactatcagtcacgacatccatcatcaattttccttctggagccgagttgctcaatgtcactaccagagtatcccagcattctggtagcaaactcagcagcaacaaagcctgcatctcatcatcatttttcatattggctttggacaactaattcacaatacctttgtaggtgttgaggtgttcaatcatgctcatgccgtccttgtactctagcttcacaagccggcgaaccaggtgtgcttgtttcctgggagtctttttctgaatcatagattccaacttgttccacaattcatacgcgttcgtgaactgggacacgtgctcaaagaggcttttgtcaatgtatttcctgatcgtggccactgccttacaactcaggatctcccagtccttgtctgattttcttgtcgacttctcctcaagaacaatgggttcatacaaatctttgcagataagatgatcttccatcatcgatctctaataattgaagttatctgcggtcagcttgaacatatccccgtcatgagttatgccaccactggtctccatctcgtttctctttcagaacccttcgaagccgggctctgataccactattaggtatccatcaaaccctcaaatcaaaacaaatgcggaagcaaaaaattaagacaagagagaaaaatacacaatcaatatgtttaacgtgggaaaaccttctcggtgaaaaaacccacgggagactaatccagaatcaatcttccactataaagataatggttacaatcaaacaatcttccctagcctttcactagagatgcaatcaaacaaacaccaagtatggtggtattctctctctacaaggggtttcactcaaacctctcgaagactcaaaacctcggccctcttttctgtctgcgctctcttctgtgcgtctcacattgcgctttctttctccacccataaataacgaatttatagaagtgaagtaggtttagggcttcaacaccctttaatgggcttaggtcaacattttgggaagggagcccaattcaacaaccatttttcaataccttgcgatttgggccaagcattgaaaacagaaatatccaacaataataatctgcatacacttgctcaagctcatagaactattaactataatgtcgtagcttttcgcctttgactcgcgcatttcgtcattatccggtaattgattccttgtcattctaatctcacccagaagattaggaatgaactattcagaatcaaaagaaactttgttgtgaggctcacaagagtttaatacaatccaaagaacacaaagtgaagacacttaccccttggaacacaatcctaggaattctcaatttggtggcagaatcagttgtccatgtatggaacggatacgcaatgagacaatctggatgttggtcatgtaatagttgttcaagtggttcttgtaacaccccagtggccctgaagaaaataggaaaagattctggtgaaggaagtgagtcgatgttttcgcatctttttggtaaaccaacctctgcactagggaatttgatggtttgaatatgaatttcattgttgtgtgctaaggttttactttttcctatggctttggagatgagagatgcattgaagggagtggtgattatagtgaccttaatccctttagcagcaaatagtttggccacttgacctgttgggataatatggccatgtgccaagaaatggaagaagaatgtgtaaaggaagatgatcactactcattttttctctccctagagtgaacaagagtggattcacattctggttgcaagtagtattttgtgcagcaagaagtaaaacaaaggagggtgagtcctgacatagtggtaaaattgtattttggtaacttgttgatcatgggttcgaatccgaaaacaacctctttgcatatgcaagagtaatgttgcgtacaatttctcttcctcttacctgcgcatagcgtggagcctccggacaataagatacataatttttaaaaagtaaaacaaagaagagagattgagaagttttgttatggtcatttgcgtcaacgacaaaaggatttataaatcacttcaatgctaagtgttaacaaccactttctttacaatattagaataattctcatatgatataaatctttattcttttcttgaggtccatctacttcttcattttttaattgtgaaaaccactcatttttaagtttgaacaatccaatcagttggtgatgaaaataaaaaaatcctatcagttggtaagctcgataataaagaaattgttattcttattttggtatctttcattgaagtcattctgagtcggataagagacaaataaatataaatttttcaaccaatttaattaactaatgaccgtgcgttgcacgggtgggatacagttatattataattgctttaagctcctataattataaattcttgctgtttacaaactcaaactaaaggcaaattgcattctctatatttctgaacttttcctccttattccagtttgagcaaaaagttatacagatttgcttactcaatactcagtagagacaaagatgagtagttgtgaacatcatcctctacacattttcttcttccccttcttaggccatggtcatatgataccaaccgttgacatggccaaattgtttgctgaaaagggtgtgaaagccactatagtcaccacgcccctcaatgcacctttcttctccaaagccattggaaaatccaaaactaatggcaacaaaatccacattgaaaccatcgagtttccttgtgttgaggctggtttacctgttggctgcgaaaacgttgactccatctcttcaccaaatttgtttcaagccttcatagtggccactggtttgctacaagagccgcttgagaaactattgctcaagcaacgtcccgattgcattgtcgctgattttttcttcccatggacaactgattctgccgccaaatttggaattcctaggctcgtgttccatgggaccggtttcttctcctcgtgcgctaccacgtgtatgggactctacgagccttacaacgatgtttcttctgattccgaatcgttcgtcattcctaatcttcccggtgatattaaaatgacagggatgcagctgccaccttttttcaagggtaaggagaaaacaggcctggccaaattgttggtggaagcaagggaatcagagtctaggtgctatggggttgttgttaacagcttctacgaacttgagaaggtctatgctgatcatttcaggaacgtgcttggaagaaaagcatggcacattggtcccttatttctttgcaacaaagataccgaagagaaagtgcatagaggtaaggaagcatcaattgatgagcatgagtgtctaaaatggcttgacacgaagaaacccggttcagttgtttatgtatgcttcggaagtgtggcaaagttctcggattcacaacttagagaaattgcaataggtctagaggcttcaaggcaacaattcatctgggtcgttaggaaaagcagagaagaaaagggagagaaatgcttacctgatggatttgagaaaagaatggaaggtaagggactaatcataagagggtgggcgcctcaagtgttgattcttgaacacgaagctactggcgcgtttgtgacgcattgtggatggaattcaacgttggaggcagtgactgcaggggttcccatggtcacttggcctgttgctgcagaacaatttttcaatgagaagttgttgagtgaggtccttaaaattggtgtgcctgttggtgctaaaaaatggttacgattggagggggatagtatcacatgggatgctgtggagaaggctgtgaagaggataatgattgaggaagaagcaattgaaatgaggaatagaacaaaggtgctttcgcagttagctaagcaggccgtggaaggaggaggatcatccgattctgatttgaaagctttaattgaggagttaagttcattgagccactcatataccccataataacagtatgcataggttgagtacatttccgcgagatatgtttttgttatctaaatttcaataatttgaactaaattagtttcaagtcctaggaacttacatttcgagatatgcttaattcaacataaccctgttgtaacattagtcatgtatttattttatttcggaagtgtacgtttgttcgatttcttatgcaagccaaatttcacatttaagccttagtgttaaactgttaatgatcctcactcatagaacttgttcatatcttgtgaaccaactggataaaatattgattagaaacatgaagcttcaattcattataccgaagtttagcagaggtgaatggcatcttcggaatcaacgagaagcaaagaagtcaacagcaaaggggaaggaagttgcagataggatggatgagagtctttctgttgctctagctctaattgatttggttggaattttcataattggatttggaagtattgaattagttttcctaactcggtcatagatgcacatggaaattcacggtttcaaagagaacgtgaaaagtgaaaactatgtgctagagtccaagggacatttttatataaacttaacgtacacttatgtttattaaactaattaacagagtttaatactagttactaacacagttagacaattattttatagccagagtaactgtatgaatccattgttaacatagaaaaaatttgggtaagctattctaggaaattctcctagcttagactcatactatatatactgcagtcagtttgttggcacgttgcattatatattcctttggcaccaataataaaggtcagagcagagtgatccgcatgcactgtgcgtattctgttgcaatttgtgcttgtttaaaagttgataccctgctcatgagtcatgactgccactttataaacttataaaaatgttgtttatgacttgtgttcaaaagggcaaaatgtaacgataatcaaatacctgaagattaaaaaaaatgaagttcaagttaatctgagacaaaatgaatgtgactgtcaaccccacaaaagtataatagttttttttaaagcaacaaaaaaggaaaaataaaagaaatgttcctccatattcaacccaaatacaacattataagttataacagaactagaaaaggtggctttcaaatatataatcttacattagattcattttcatattgatagtagaaaccatgtataaaaaataagaaactatacctgctccctatttttcttttgaggattattccaaccaaattttctccatggattaaaaattggtctttcttcaactttggttgtttttatgtcagcgagaatgcttccagtgtatatcaagtttatttatgttcactaactttcttttcatatttgaagcttctgtctgtaaaggtgattctagcaccaaaagactgtcttctgaaggttatgttacctgccacacagtcatctaccatgttgtgacctacgtccgatcaaggttcgttaaaaggttcttcagataggtaatgttctgattttttaatgtgttgcttagtgtccatttgtcttagatttgtctctacatacaacgtgcaatacatagatgatcattttgttaatgaatttataaaaaggaatttatgaatgtaaatgttaaataagtatagaaatgacctttgattatcatcgtgttattcagatagcaaagaagagggcttggaaagctgttagaaatcacactcctaagcctatgttagtgtattctcgtacccaaattcccaaggccaggacccaatacaacaataggcaggaattaatggaaggggcagagttggttatatagagacaaggttgagtttgtttatgggagtccatttatgatcaatttcgataaggcataagtgtatttttagagtttgtttattgaaaatatagaattttttatcgaataaaaaacttttattaaaatagaggatggggtataacataacgtaaacaaagtaacagtaacagaaaacaaacccaatcctctgtcccgaaatccaaccataagaaaatataaatatatgtaataaacatgtatattcttgctttttaccttttctatgtacaactaataattttttaattagttttattatattataatatacatataaataatatttttcaaaaattttgaggggccgtggctccccttgtccctatagagatccaagctgcatatatacctagtagttatataaatatggtgtatgactctgaataaatttgcatatgttataaagatgtatgagttgtgtatgttcaatttgcatcttcaaatgaataggggtgtatggtgtattttctggaaaagagtgacgtgagaaagagaaagagatgagtggagtacattcaaagctgaaaaataatgaaaagggggtatatttagcaaataggggagtgtaaatagcataaatctgtattgtttctttttaattttttagccattgttaatgtgtttggactttgaacaacgagcattttattatgaattggcgattagtgaatgaatcttgactagagtttatttttttgttttatattctactatgaagtgtgaacagggtgataagctaactgttaattttttttattaatattctattatggacaaggagaatgtaggcaatatggttatttatatgaatttaacatgattcattacggattgaatttttctttttcatgttttcttcattttcctaacttttgctatatttgtcaagtaacccaatacgtaacctgattcgatcgagcttaaccgttgggtcaaaatcgggggaaaagactatattatatttgacaaaattaaccgaaaaataaattgaaagctaaaaagttagctgaaaaataatttattaaattaaaagtatttagtaaaattaattgttgaggtagatgaaaagtttaaaatgataaaaaaatatatatcatgatttatttaaaaataacaaggaaattaataaatatatcgatgataaaagttgaagaaactataaaaaaattagaaactattattttagaaaatgcatcttcaagtagcatttaaaaaagtgctaaaagctactaaaaaaatttgttttactaaaaaatcaaatgaacttttcatctagtaaagagttaaaaactaattgaaatattttgttgaacatagtctaatctgaattgattaatttgacttggtttatttcatccaatttggttcctatttttgtcctaacccgaaccgatccaacttgtgtttgtcctgatacattaatggttaaaaaataaaggttaaattattttttttgtcctttaatttattatttaggtttaatttgatcctctaattttttttgtttaatttagtcttcttatttttaaaagggattcaatttggtcttctaatttttttattcaattcgagatctaaattttttaaattggttcatcttttttgggaaatgcacattttgtggttgtaaaactatttagtgatagttttgaatggtcacacaatgtaatttcttataatttagatttaagaaccaaattgaatagatttaaaaaattaaagaactaaattgaacttataaaaaattagaggatcaaattaaatctaaaaaataaattaaataactaatttaaccaaaaataaaagtaagtagttatataaatatataatcacatgatcacttaaacaaatagttgtattttttgttttaattttgatcattcaaatattatttaatgatctatatttaatttgtattttcatttctcaaaataggaaatattcttcatttgaaataataataataataataataataataataattttctgactgatttatgagaaagaatgtggatattttaatagattaattttgttcccaaaatttgataaacttccaaaatagcaactgttgaatacttgaattcaccaatttgaaagaaaaatcaattatcaattatcaattatcaataacaaaagtaaagacaacaaaacaaagagtcaagtggaaaaaggtgcaaatatcaaatatgtgacttagaataaagaccacccttccattaaagttgaaccatatgcatacgagtaaaagggcatagtgcttggagaaaggttgcttcgatgaatgtgaactgaacaaagatgtattaaacggtctatttagaaaagtaattatccatttcttaaagtttccccttgattgccggcactccaggcaacaagtgtaataataatcaagttcaaaattcaattcataatcaggggatttggactttagtattttttttttcaataaaaagagtttgttgttgtttgtttctactcaagagaactatcctaatcctcaacctatatagagagagagcgtaaattgggatgtgaacttgttggtcaatgccatcaacatcgctttatttgcggcaccaggtagttaccaaaattatagcaggttaggtgttgcatactcatgatttttcaaatgatagcgattatgccaaatgtatactacatggatatcatttgcttaacccattaactaattaacaaaaatcattccttaattttcccgccatgagacatggacattcacgttattattaaataaatggtggagtggcattggttatcggtttgataagctcaatttcatgccataattaagcatcattcagcctctgacaaaaaagaaaaaaaaaaaacttcgagtatatgtacctagacaataaaatcttccactccatcttcatgcgctatattattcatctgaactctgaagtaacaggtcagatatctttatttcacaagtcagataggaacggatctagaaattttataaagggactgaaattattaattttttccttatttaagtggttaatttttaataaataatattttttaaaattattacttttatacataaaattaaaactaatttttatattgaatgataacaactttaattattattataataactacaaacatactattactattatttagaaaacactatttcgatatttaaatctataaccagcaagttatttagacataattttatttttatttagacataattttatttttatctaacgacccaccctcttttataaaaatgaatgcatttattaatctattaataacaaaactcatatttatttgttaaaaattactccttaaattatgagtagtacactacttaaatcaattaattctattaataaactttaaacttatgatattaattataataaatttatttaactactttattattgttgaggaattaaatattttatatatatatatatataggaaaagaggtaaacttcttatttaaatctcttttatcttggtgatttctaaaccagcttaccttctcgaccacactaaggagatatgaattccattttggcggataagggcttggcttgacaaaatgtgcttgttgcgggtggggatgaggactttggtaaggagaatatgctttattacaagaaatcttttaaaagaataataataaaaaagaacactgggttattgtaatttgtaaagaagatttaaaacattttcgaccaaatcacatgctactgtttcttataaactctcatgtcaaactaactatcttaaacttttaaataaagttaagcatttttaaaaataaattcaacattttaatatatatatatataattagtcaaacatatagttcaagtgtttctcctagtaataatatatagtatatttattattatattaactcatatgtatgatattattaataattattaaattgtaattttttgtattatggttgttatggttaaatacttatatttaactattataataattgagatattattaagtctagtcttatacataaacaaaaaaaatatttttctttggtcctaattataaggaataatgactagttttcaatcttatttagaattaaatacctttttatatccttaatttattactaactttatttactaaacacacttattagattatgagtattaacattaannnnnnnnnnnnnnnnnnnnnnnnnnnnnnnnnnnnnnnnnnnnnnnnnnnnnnnnnnnnnnnnnnnnnnnnnnnnnnnnnnnnnnnnnnnnnnnnnnnnnnacatttaaatttaaggatacttttgaaataaaatttaaatttatgatagtattaaatatcaccattattttctttagtcttgatgatttgtattatattgtttatatataggattagaattagtattaaataatgcagtaattactactttttcttccttacaaaaaataaaatactactatttcttatgataaataattaaatagtataatagagagaagtgactataacacattttttttattatcttaacctttcttatcattaggaaaaaagaaattgattaatatgaaatttgaccattaaataaataaaatctaacaaaaaattattttcttcaaaaattgaacttaaataaaatttaaataatttaattttaattttaacacattaattatttatgtctaattatctgattaactgataacatgcacttacatatataagaatatgaaaataactaataataatcattaaataaatattaaacataataagctattaaaattaaaatttaattataatatctttataggatcaccgacactatcattgtctttatttttctccttttacattattatcatcaacactgccaaattaactaataattaaaaattaaatgaaatccatgacttatatttcaaaagtgatactatttctcactcatgacttaccgtaatttaatttcttaaaacagtacctccagagcagttgttaaataagatccaaaaaatttatataatctcaccaaatttcataagtgaaagagtaattcaagtagtccactcttaaaaagtttaaacaatagtttcggcccacgtctgatattaataaatgtaccacgagaaatgtggaccatggcagcatttacagtctccacgacctatggctgggtcttgggatacgtgtgacccttctcaaatctcaaatcctctcatcgattcctctgtcccttcctaacttgtatgtagcttcccctattccacagcattagtactagtactagagagactgagatatttaagagaagataaaatctcccaagaaacaaaaacaacaacaacaattctctctctctctctcttcctcgtactcccgaacagaatgaagaacaacaacaacaccaagctcatcctccttcacccttccctccacaaacaaaccctgacacccaccgccgccgccgctgccgcaacaatattctcttcccaccgtaacctctggctccttttcttcttcctcctcttctccaccctcctcttcacctggaccatcatctcaaccacaatctcctccgccacttcaatcacttcctccgacgttacctcccctctctcaccctccgtcacaaaggccctcctccactatgccgccgccgccaactcctccgccaaacccatgtcccccgccgaaatctccgccgtctcctccaccctcctccgccttcccccccgccccaacctcttaatcttcggcctcacccacgagtccctgctctgggccgccctcaaccaccgcggcggccgcaccgtcttcctcgacgagaacgaatacgccatctcgaaattcgagtcttccaaccccggcgtcgaagcttacgatatccaattcacaacaaaagtcagcgaatacccaaaactcctctcccaagcccaagctcaggcccacggcgactgcaggcccgtccagaacctcttgttctccgaatgcaagcttgcaatcaacgacttacctaaccacatttacactgtcgcgtgggacgttattcttgttgacgggcccaaagggtattttccggcggcgccagggcggatggcgccgatcttcacggcggcggtgcttgcccggagtaaaaaatccggcgacactcacgtttttgtgcatgactacgggagagaggttgagagggttttgagcgaggagtttctgtgtaaggagaatttggttgagttggtggattcgttggggcacttcgttgttaagagtgaggctcacgacggagaaagcgcggttttttgtaagaacttgccggcgttgccgttgtcgaaggttgtcggcgacgaagaggactaggattatgctgggattctagagaatctgtaaaattatatttttattttcttttttatatattttaatagaaaggaagtaaggaagtgtaatttaatttggcgctatagtaagtggcccgcttttctccccaaaaaaagggggtgaggaatgtgaaactgtgaatggcttttttgaatttattataaaatttagtgtcaatatccattttggtcccggaattaaaaaatataaaattcaaatttaatatacgattttgcaaaaagtttgataaataatttaataataaattgatcaaattggtcttaaaaaattataatttattatttaattaacttttaatattataatttaataagaaaatgatttttaatgatcaaaataagtatttatcataaaatttaaaattaatattatatctgcaaggtccatggctatgattaaggcgtgtttgttggtttcccttgaaacttgaagttgcaggcgagaatagaaaattgaattgggcgggaaagtccactttatttcttgtcttaatgagtttatgaggatttcggtttcaagacatttattggtattactattactgttaagaaaacagaaacgatgataaaatttgagtctcttcttattcatactcctattatacgggaatttaaaaattatgaaatgtagtttcttcacaaatttaaaacgatatttataaatagtaatagttgttaaagaatagtaaagaactgttttgcttatagaaacaattgttgtaaagaattgtcacatgtgaaattcattatatgatatttttgttaccagcctaacactggtcaggatttatggatgagtgtcggtggtggtacggacagaatttgccagcgatgacaacctcttttactttttctaaaataaaatgtgaaatcatatcatatgatataatggaaaatactacaaaggaaatttaaaatatgtgttgagattgtgaccgtggaacatgcgtttgcagtagggagtgcctgtgcctgactatcttaatattgcttttgactggttatattaatgtatggattaatttctgaatgataaaaaaaaatgtatggattagtttttttaaaataatttctttttatcaatttgtttctagatgaaatttaacgtttttcaaaataatctgcttctttattccagacgactccaagaatgttatatatttgcaaatttgattttttattttaaattcagcaaaataaaacatttaacttttaaggtttattatttgttataaaaaaattgaggattcggattaacacacagacacatatattttttacttcgtatataataattcaataaatatttattttatataattaattttgataataaataaaagtttactcttaatatttaaatttagattttgggttttgaatgggacaacaaccggcggtatcagctacgtacggccatcacaaaacagatagtacgtcctagatatcatataatgatgaactaaattatttgattacaatattttttgtctttctcatatttatatagtttataatcatattattttattacaactgattcttatctaaattttaataattatactctaattctgtaatgtatatttagtataagacaatatgtctattcacacacaaaaaagaagacaatgtcagaaaaaaaattagtattaagataatgtatgtttacaaaacgtgcatctaacattgttcttgtaaattataaataaattgcacccatcatctcatgtatttgtacggccgtttcggctttatttgaattattattattaataaaacattttttagaggattaataaaatatttgtgaagtaagaaaatatgaataataatgtatttttctttgttaggtggagaaaatatgaaaaagaagaagaatatttgacttttaaaaacaaaattttaattctttttcacttttttataattttaatttcagacttttctctttttctcttttttctcattttcctcctaccaaacattaattaaaagaattgctcacattaaagaacacaattagaaaagactcgagaattttcaatgagctataataatcttagtatggtagtaacgataccacacctatatatctatactacatgttctctaagagcaagtgaatgataagtgtcttaagaatattattttaatgatgattttgtaggtaatcatgttaatattttaatagtttgatttggttttgattataattaatttttaaataaatcagaataactttaaaataatttaaatgtttgatttttcatctaattttaatttatttttgggttcaacgtgtaccgtggactcagcctgcaaccatttaaagtagtgtaacttttgtatgtccgttcgacgagtaagtgcacgctaagcgcatagctcaattacgtagaaacgacaatgcaacacgtttagtcctatttaagcatcaaggatgtgaatataagacaaatttggttggagaactatctaggattttaggttgtagttgggaagctctcccttaacctcaacactttcctaccatttctcatcctctttttcatccattttcttcttgtagccatgtagttaggtttatccattttggaggttgatatagttgaactcatctttatgtttacattttgattattaatctatgtttattgttcattattaagtgttattttctatgcattaatgtttgttttggcttgatcaccctttgcttgatattgtcgtttgaattgtcatgagaaatgcttttgaacttagaaatggagaggaacacctaatgagttttgtgtttaaggatagagcaaaacttgatagttgtcttttaactcatgtttttaaagcaagtcatttggttagactagtcaagaaattgatagtttggtcaagggagttagattctttccattcgagggatcggaaattgactatttttgttagttgatgatgatagttgggctttggactagagaagtagactttgtttttcatgaagatgtggttgagtgaaatcaactcaactcttttattctttgttactttatctctttttatcacattccacgtgttcgtaaaaatatttaaaacaatttttgtttatttatactttgctatttatattcccacaatccaatcattattattgttgtttccgaaagtcatagttagttaacattgctatttttatgcaagtttccgtagatacgatactcagactttccattttatattatttgtgcgacttggtatgtttgctaagaaatcaacaagtatgcaactcaatatcttaactatagtggcatgattcttaaggtaagtaaagtaaaagcatcaacaaaccacaacgaaaaactttaatattggttttaagttactttttgtgggtttattattatcacattaactttaagaattctaccaattttttattccaacgatgaactcataagaactttaattctagtaattaatatgtattttaattnnnnnnnnnnnnnnnnnnnnnnnnnnnnnnnnnnnnnnnnnnnnnnnnnnnnnnnnnnnnnnnnnnatatatattctcaaagcataatttgtttccccaaaattttaaaataaaataaatacattatattaattttggattaaaaataaattaaaaattaagaaaaatagataatataacaacaaatttttaaaataatttttaacttgcatttccctcatgctagaaacgttctcaaatgtgtttcactaaatctacttaaagttgtcgaatttcaaaatcaaaatgataatcattatatacttcgatggttgacttattatctagatgatcataagagtaataaaaattattatcatatgtgtgtcattcattcccaataatcatgttatgaaaatatgaaatgtgatgcatgcatatattatatccttaattgtatctatctctagtgaaggattgatattatgcttgtaattgaagaaatcattaaattgacttggatctattttaaaagcaatatgaaatagataataagaataacaataaattgcacaaatgatagaatactaaaaatagatgatttgagattgacaaatttttgtaacttcatgtaagtagaatacattgaatagaagataggttgtgaaagttatgaaacaaggaaaaacaatttacagaattttactcttcaattgcatgcaacggttaaatttgaacctacttacaaatgtaggatcatttcaatctcagctacaatggtataacaaatggtaaaaatttattatcattggtcatttcacacatgtaggaaatggtacaatttagccaccaccaacctccacgaacccagatccacatgcagccaaaaacaccaccaagccacccgtttgactcgctcattgcccaagctcaacaacgttgttgtgtggatctaatccttcttaggatctggagagccaggcgcaggtgggaagtctattttgggtgcaatcaggtgcctccatctgctgctatgtactttatttcttcgccacactatgtactttattgcaaaatgcaaccctaaaatctatattagtgtgatctaataaaatatactaaataactctacttttgcacataatagcattatagcaatacgaaagccgaatttgatccaaatgtaacatctagaacaagataacatttatgtatttatttataatccaaagggttagaattagtgtagtagaataagatcgttcgcatgtggaaaatgatttaattagtgaaaaaatttatgtttgattttctctatgcacaaaatttttaggtcaatagcaaccacaattcacaagtaaaattaatcttaacctaataagttgaaaaacacacaatctagatccatttttcttttttgtaattccattctcatctagcttacacaagtcttaatttgtgcaactcgcgggtagaccgttcatggtttggttattcaaataaccatatccataatcagttttgtatagccggatattattttaaaaaaattggttatataacaaaatatataaatatataattggttttaaaaataaaaaaggtttttttttatattttttaaaggtggaaattaattattgatttaagatttataacggttatataatcggttttcaataaataatcggttacataaacagttatttaacggttatgaattggttaattataataaccatttatcatatgtgtttaatttttataactattttttaattagcgaccatagacaattaattataattatggttaatttttcttagtcggttattataagcactcacatgcacgggtcaatatctagtttattctatttctaagttcattcaacattaatattatagattccaattctatgtcagacatttatcttgtatttaggtccattcctctcattatttctaagactaagaggctgtgtcatcgcatggtgtaatctttcagccaattgttatccatattgttatactactaagcttcaaccatgggataatttatgctactacatcaacatggccacacaccataaatatgtcaaatcccatagctttatcacagtaattacacgtaattacacgtgtggcttcaacctccatcgaaacacttctgcattagtttgcccaaaccatcaatacaattgtacaacaccatataacctcaagactttcagtacatgagcacgtaagttcggcctcatagaacgtcacaaatttcaattcttcaatcatgatgccagccagtgattcattcgttcatacattagtagttaagtatatcaatcggagaaaagaaaatagtttcatccataataacaacaattgaacgtccatttcatccaattgcattgcaataaaaggctgggtttccccccaaattcagacactgcaataaggagaaacttttgaattaagcatttgattgaggaagttggttctcttaagcaattaacttgcggacatatgcaatgtacagagcaaggaccctgaaattgaaataggcagtcggcgcaaagttagaagcttgaggtggatgcttggcaattgcttcctgcatttcccatattgattctgcaatgcaaaaagcaatttcggaagtatagaaaaaaaaacaccctggatgttcagatagagggttgatgccgtggtggtctcaggggttacataagagctcactttagaggaaaagtagccaactgtctaactcccattttggctcataatccaacgggtagatacacccattttcctaacccgttagatgaggctcgagcaataatgtaatcaagagatttgaatcctgccctctcatatgtgtattatgtacccacatttttatttgaaaatactaaattatacttctccaaccctaacatcttcctctttatgcaaaccactcttgggaagatacctccttcaaccgcgatggtaactttcttttcccacaacttcaccttcatggcaacctagcgagctcctcctcatgagtcataatgccgcaaaacctccacccccctcctcctccctttgtgcattgccattgaaggtaagaatgtgatctggaacatggtattttgtcttttggaaagacaatttcataatgcttttttattttcaaccattattcaggagaatgatactagaagctacatagtaaccttacgaaatgatcattctggaatatagattgagttctacaatagcctatccagaatacataaagtatttttatatttacaaccattattttttactattttggaataggcatttcaggagctattttttcctgttatggaaatttcagaaactattttttactgttattgaacacttatttcggaaggcaaaaattatttttttactgttatagaacacttattatggaagttattttttactattatgaaacacctatactagaagttattttttactgttatgtaacacctatttctaaatcctttgttttactattatggaacacctattccataaaacaaaaagcttaataaaaaatgggagaaaacacagtgtatgtaacgaaagtttttatgtgcagctggaagaaatcaatggcgaaaaaatgaagacgaagaggaagaaacaaaagtttgtgagatagatacaaatggagatctaacattggagaaaagacaaatagagtgaactcaggtaaaactccctcgtggaattcaatgcggaggaagagaaaaggtataatatgaaaagggtagtttagggtttttaaaattttgggaggtgcataatttattaagggaggtgtaggatttaaatccctgtaatcaaagaaaaaaatattgagcccaagagcaattcaggacacatacaggcccagcatggaaattaaagggaaaaggcaattgtagatgctgcaagtcgtgagggatatggacaattaggatcatttcaggagagtatttatttgccacactagaaagaagaaacacaaccgagtgaacaattgctcaagggccaaataaggttaagggaaaagaaatatttaaatgtggcccgaacttagttaaaagggtgaaagagaaaagtagatagaaaaaaacaaaagggttgatataaaagtgtaaagtcttacaggattcatatgtgaaaagaaaaatttaattaaaaaaattgtgtttaattttctttttatataaaattttcttggatcaataataatcacacacttaagtaacattactctttgaccaagtaggttgtgagacatttgtgttctttgatccaaacaaagaaatatagaataagaaaagaaattaataagcaccttgtcttgttttgcaccaaacttaaaatgttagggtcaatattttttcatcagatgttaggattttaatttatataaaatagttaacaaatgacttttgattattatgaaattttgcatataaatgaatttttaatccaatgatgagttttaaataaatattatccagttaaaagttataaaatgatgtaataattgtcaaagttataccgatataatttgatgcattatctaattataaagatttagtatgtgtttaaataggtgatgatcaattaaatttgctatagtttttggaagcaacaaataaaagaaattacggcgagttgaaaagaaattatttatttttttataaagaaaacatggtgaatttaacttaccatgaatccaaacacactaatgcataagaggaatacatacaaggtcaaaacgtattttgttttttaataagttaaataaaaataatttctataaaaattaagtgcataagtttattttaaataaaacaagaagttaatttttatttattatcttgtcttctcttataaatatttattgagaaatttattgaaatagagtttaaatataaattaataacacttttaataaattcttttaattttacttttttaaccaacactagcttcttttttaaaaaaataaatttgcttaatttgattggcttaacaaaaaaaatgataatgacttttaagccacgtcacaataatagacataacatgtcttgacttttttaaaaaaatttctcttcggtctcttttcataagagcttttcttattggccttatcattttccttatcattttttctttctcttctatgtctctttcttcttactaaggtattcttagagagttcgaaatgattatttatttacaaaaatgaaaaaacggtacttaattcaaacaaattagagaatatacatatggtattccacagtgctcaactactaccacccaaccacttagaacttcagcttccttccatgatgacataaagcatacgtagctatgattaattaataatcaatgtttggttaaaataataataataataatcaatggcaaccctttatttaaatatcttttggtatagtcctttatatcaatatttttttgagagatctttatatcaatacattcttctttttctttacataaagcatacgtttccaaagagctctttctttcttttttctctggagcttttctaaagcaaacaatggcatacgacttttaattgaatatatgtgtgatcatcagcttataccaccaaccacctccatttacagccacaaagcaataagggactggagcagtgctgtttcagtttacattataacatttgagtatgggtggtgatacatggacatacatccatatcttttaaacatctaataaatatttattattttactttatctttcataaatcatattacctataatatattcttatacttttcttattaagtatctattgacattttatattgggtgttcgtgtataatttttctttgagtataagagcccccatgatattttaggaaaaatatatatggatacctattatgctaattgacaccaaaagagaaaagaaaaaatatattaaaatataaatataataactgatataatgcaataagaaaaaaaagatagaaaaatataaaaagtgttgatgaatttttaaatatcactagatatttttaggttgaaccacaatgtttgcaaatgggtatatatatatattattttagttataacaaacatacagacttaatgcattaatttctatttttatactcttaatttattttgaaatatattaaaaaacactcattcattcctcacacaagtatatatttattagcgtattaataatttaagggaaattttttttactccatatactttcactttttcttgttttgagttcgaagtttcatgtggtccattttaatctttgtatttcattaaaaaaaaaacatgttttagttcgtctatacatattcttcacatataacactaatcttttatgttagaattggttgtggcactactacaaaaggtcagttttacgacgggtaaaaaactattttaaagtcgggtcatcaaacgtcgttgaaatatgtgtcgttgtttatgtatcatagcaacgacggtcacatgaccgtcttctttatatttttatcaacgacgggtcttacgatttaaccgtctttgattttggtgtatgttttttatttaaaaaaaatgtcaatatatctacgacggtctcgaagttaattgtcgttgactatagccaatataacgacggtccttgcatgaaccgtctttgatttaattggtttaattttttttaaatatgctgaaaaaacgacggtcaatgtgtggcccatctttgatttaaatggtaataacgatggtcatcgagaaccgtctttgtaatgaatgcttttttttcatttttcatttttttcgtgttggggtacatttttcatatatcggctgactgtaaatctgattaaaaaaaataataaacaacatagacgactatgatttgtgtggtcacattataaaaattcaaattttgttacataatattcatgtaaacagtttagttgtgagatcatttaaaactacccttaattttatcatagttttatgcaaaagcaataacacgtctttgaaattgttattatgtgaccactctttcattctaataaaatatcataatatagtttgattcttactttattttttcttgggtcatatataagcgaatcatatagcccaatcaatgattaaattgttgttagtttaaaaaaaattatgcacaaaagtaaagaatactgttatttaaacgagataattaataatcaaaaaaatatgcacaaaaggatttttaactcaatctaggcatctcttcaatcacaataggttcagatttagacatatagcacttctctttcattcttctcatggattatattctggagttgcttacttttttgtgcagtgttgcatgatttggctcatcaaagggcaaatacccggccataagcacaaagaggatgactccacatgaccaaatatgtgatgtagaaccaacataacctctatcattaagcacctaacacaaaaagatcaccacattacattaactgcaatttcaataaatatattgttactaattttggataattattatttttcggccatttatatataaattttcattatagtggttatcctgcagtccattatcccactatagtagtattggtgtggctgctccatgccactactctagattaattgactataagaaaaatgtacgtgttgaacaatttcaaaatattataattatggaagcaagagccaattatgtcattgatgcatgatacatgtgtatatggatcctaataaccccttaccacttgcatgagaagacatttgaaatgtgatttttcagttcatttagctttggagctgggtcaatatgactgccctccatatttttgtctgccataaccttcaatattgtgaaaacacaaatacatatcagatacatcagtccaaacaaattcaagttcaaagatctttatttttttgagaactttggaattgaacctcagaccccacacctcaccaacccatatgagcttaagcccaggtcatgaggttgaaatgtataattgtaggtggaagttttcaagtaacaagaaagaagacaatttagtcaaagccattacttaccaacataatttggctcatcagttccattcggacaccaagcagcccaaatcaatgaaccaagagctaatatatctggtttgagaagatttgcctcttggaagctgaagtcctttatatttggccctcgagcatagaataatgctacctgtggtgcagatttatgcagaataggcattaaaccatcaccgatttggaaaactaggaggatcaaaactgcaattcagccaaaaaaattaagggccaagagaaaatggatttagcttcaaactcaatctacctctacatagatacaccaatacagatgagtctgattacctttgaattgctgacatctatgatgagaatcccaagaaggccaacagggactggatcaaaccatgttcctggggaaacgttttcaacacaaagaacaaatccaactgcaccaagggcctttgctgtttctgagactttcttgattgatgcagtgccaacaacaaagttgaaggaatatccacagagaagaatattgccctttattaaattcttatttaaaagttctggtctctggcaatccgtggggctatacttcatagctgaagaatctagtaacacatcatttgtgacaaccaatgtgtatgtttcgtttaaatgtgtggaagctgcacaagccattatgcaaccaacataattcattaccaaaccccaacataacaaaacaaacataactggtgaaggtagtcaatatgtataccagtctgccaacatttcacaacattaagtagtcagagcttaatatttcagatagtcaccctcaactccaaaccattttagatggggtataccagcttcaacaaagaaaagagataataaactactaatttcacataatgacaacaaagataatgaatggatgtcttgcccgcaagaaaagaagttgaagacttgaagtataaattggaaaataaaaaaaaaaacggtccactcattaattgcactcaccagcttgacagccacttcctccccactttgcacattaacacctgacacacacaaaagcaccagaagatcaaaagtggtgcaaactacaaatactaatgttttaatgataatactaaataaggtgtatatatacctaagtaaagctctccaaacggtccactcccaatcttcctccaagcttgaattttccaccaataacatgatccatgatagaagcccaatctattgatccttattaaattacaaaagcactaaactacacacctcaagtgaaaaataattgtttgcctaatccgagtattcatcgatgattcatctttatttacagcacaatctcagatccactaagatttatcagtaagacagagatccaaaactccatttagcaattgcgcagttcaggctatgctaacccccaatacctcaaaaatcaacagaaaataaacattgtactagatgccttagtttaacattgttgtaaaacatatgaaattaaataatagtgtgtaattttattgatcccacagttgtatcatgtatgctgcccatttcttccgaattgatgtgatggtctccaagtctaacggtgatctatcagcaaagaactacacacagttaatggaaacaagttagtgaccttcatcatagacaacaataagctaaccaataaaggcaaaatagattagtgtaatgtaaacatactatggtccaatcacttatcaaacccccgcttactatgttccacatccatgccattacatagtagccacactcataagcgccattttggacatgactctaaaattagcaccgaattattaaagtaacgtacgtaactatgaaaaaaactatctcaccaaataataacttgcgtaactaaccataatgtcatcccagacgagactcttcaaagtttctggaacatctttccaactacaataagcaatagaaatcttttcccttgcaacaacgcctaagtagctgtgaaacttctgtttatgtggcccagaagctctaccagttgcaggtcgacgttcacaattggtctagcctcatctgcgtgtcataatgtcaatgttgttaaccgtgtggatcgtctgcttctcctagacgtggacgttgaaacttcaggtacttcagaagaggactgtggaggtgtagtcattatgttgtacatgcacaaaaaataattattacaataaagcatttcacaaacctgatcacagttataataacaaagcataagtaataggaatacaattaataatgatgcagaggaagtgcattacttcaaaataagacaatcacgtatcaatgttctctcataagccttcatcatgatcctcacgatttgcatgttcctcatccaatgcatgttcatccagtaagggaggcatatgtggaatggctgcatttagctcgataacatctagtgcagattgttcactagattcattatttgttggttttgtaaactgtaaaaccactgaaaattgggagtccattgggtcttgtacgtaaaacacctgtctcgcttgttcagccaagatgaaaggatcgtctttgtaacccaccttttttaaatccaccaaagtgaatcccatacgatcttgatggacacctgtgtttccgttaacccagttacacttgaaaagagggaccctgaattctttgtaatcaagctcccaaatttgttcaataaccccaaagaatgacattttagctcgaatcggattcttatctgatgcactacaaaagtgatctgaaaatgaatcaacacttactccactgttctgcacactgcttacatcatcttgtgtcttcgtgtagaatgagtagttgtttatgtcataccccttccaagttggaacattgagctttggtctaatagctaacagtcttaatgttatagaagcattggcatcgtcaaatataacgtctttaaaccagttaatgaatgtcctattatgctctcgcaacaccttcatgatgttcatcttagggtgtgtctcagcaacaatttgtttatgcctttccaagtaaggaataacctcttgcgtattgttcaaaacatacaaatgaggaactaaaacttcacttcgactcatagtgacaacatggaatcctcgtgtccccttacctgtgcatgtttgacaatgtctgttttcaggcaacccaactgatataagtgtgtccatgtaatatgaacaaaattctatagactccttggcaacgtacctttcgacaatggacgcttctggtcggtgtagattctttgaatacccctttaacaccttcatgcatcgctcaacaggatacatccaccttaagaaaaccggaccacacaatttgatctctctcactaaatgaacaataaggtgtatcataatgtcaaaaaaagaaggaggaaaatacatctctagctcacaaagaacaacagcagcctcattttccaagtcatccaactgttttgcatcaatgactttgttatagattgcattgaagaaaaagcacaatcgagtgattgcaacacaaactttgtctggcaatgttccgcgaattgctaccggcagtaactgttgcattagcacgtgacaatcgtgggacttcaacccaaccaatttcaaatctttaacagatacaaggctcatgatatttgaagagtatccttgtgggactttcatattacgcaatgtatgacaaaatgattttttctcctttgttgacattgtgtaacatgctgggggcaaatattttcgccgatcatgatccaccggatgcagttgctgtcttatacccatttcaaccaaatcctaacgacacttcaacacatctttttttttttttgcctttgatgttaagcagggtgccaatcaaactatcacaaacattcttctccacatgcattacatctaaacagtggcgaacatgtagatttgaccagtacagtaagtcaaagaatatggatcttttcttccatatgttcttgtcagaagaatctttttttttgtgtcttcccaaacttgtttatgtcttttaccaaatcataaacttcaactccatgtaacggttcaggggctttgtcattttcttgtgttccgttaaaagcttttttcatttgtcggtacgggtgataagactttagaaatcgacgatgcctattatatattgtcttcttcccatgttttagctgcatgtaacttgtgtgtttctcacaaataggacatgcatggtgtcctttgacactatatccgctcaaattcccataggcaggaaagtcattaattgtacaaaatatcattgctcgcaacctaaaggtttgttgcaaattcccatcaaacacatccaccccgtcagtccacaatgttttcaagtcttctatcaatggagttagatacacatcaatatcatttcccggctgtcttggacctgctatcatcatagacaacattatgtattttcgtttcatgcacaaccaaggcgggaggttgtaaatcattagcaaaatcggccatgaactgtggttactgcttaaattaccgaaaggattcatttcgtccgaagcaagagctaaacttaggtttcttggatcgtccccaaaactaggatacatacaatcaattgtcttccattgcggagaatcagcaggatgtcgaagcatgccatccttatttcgcccatatgaatgccatgtaaggtttttggcatcaaagggattagcaaacaatcgcttaaaccttgggataattggaagataccaacacactttttctgggctattgctgtttgtgctactgttttgactacaatcatcatttttttctttgtaccttgatgcgccacatgaggggcagttggccatttcagcatatgcatttatgtacaaaatacagtcattggggcaagcatgtatcttttggtactccattcccactggacataagatctttttggcttcgtagtgattctttggcaacttgttgccttttggtagcatctccttcaataagacaagcaacgcagtaaagcttttgtcactccacccatatcttgccttcaggttcaccaaagctaacaccgctgacaatcgtgtgaagcttgtgcaatcagcatacagttcatcctttgaagcctgttttatttgttcatacaaaggtgaatgtacagttctgaaagtatcttgtccaaggtcacgtattatatcttctatgtgatctccgccgtcgtaagcaacatgcgcactctttgaacttgttgggacctgtgacgattcgccatgccatatccatttggtgtagtttggatttatctcgtgacatataagatgggattttatgtcgtttggtgtatgtcgtctcccattcatacatttgacacatggacagaaaaattttccacccacactagttgcattaagttcggtaaacttaatgaaatcatctaccccagcttcatattcatcacttatgcgtgacgctttcatccaaatttgatccattttccaattaataagctgtcattatgatattgaaaatgttatatgcatcatacagatgtatatgctcatattaataaggtggggccctatcccatttaggaagttacacattgtctacatgagttgtacatgatatatgttttgcatggtttgttaaatttaataaaattttgacagcatttcgcattggtctccaagtacacaacatcaaagaggttatttgaattcaccccaatgtagtatgcacttggagatcaatgcgaaatgtagtgacaccgtaatttcattaaatttaacaaaccatacataacatatatgatgtacaactcatgtataccatgtataacctcccaaactgtccaaacggacaattcaaggttcaattcaacgaataattcaaactatctgtattactcactgaattgatccttgaacgggaaactaaggttgactaagaatgcaatgcatgatgtgacaaagcaatactgacatataaacaaaggcggtgtaaaacataaaatattgagaaacaagggacataccaagaaaggtggacaatatgaaccaaaggagaatccggtgacgccgatggtagcaatgcacagttgtttcgtgaacgaagaaaaggtggaaagatgccttaagctcgtaaatgacaaaaaaatcaaccacctaaacaacaatgaaagaataattaatacaatgtattcaataatttctgtttcagtgactttaaccttgaaataactcagtagcgttgaaagattagtatgaaaagcaagaaaggcattagtgctatggattaacatgcagcttggtattgaggtcagcccatttatcccttctcatacttattttcgatggataataaagtgtgaaatttcaaccccttattatggtcagagggctgcatttatagctacttgttatgatgcatttctttttttcaatatattaaaaaataaatcaaagtaaaaaatgaatttatatttctgaaaaagcttgatggatagaacgatagtacatacaaggctgacatgtaatatattagcatcttaagataaggtgtaggttcaggtctctctctagctactgggctttatgttgacagtgttcaactttcatatagttctgtaagattataatgccctgcaaccttgtgatctccattccacatcaccacatcaatttcaagataggcttttcccgttggatgagcagcatcaaaaatcaagtattctacaacattctcacacaatttatattctttcattgtcctctgccctccacagctttgaaatcctctgtaaggagtaaggacgcccaccccaaaagagggtgttgctaacatttctgttctcataaatctcaagaacacatggtcatacattttgcctcatgctgccttagacacatggtctgtcttgtgattgagaagcatatataagagccatctcaaacgatttgcacatataactgttttccagattccttcctttcaccttggctaaaccataaccataacccacccaaacctattacctatacataaataaaaaattaaaaaacactcttctaatccaacaaagttccagcattcctgacccagcatccggtaaagaagaacaacaccttcgttacccgattgagcatgcatgcagaaagaagtcctggcaacttgtctatgaccattggattacttgaaggagaaacaactgagaatggaagcaccattgttaggacagaatcaattaaaccagatgtggctgagaaggtttctcaagattatggattgccatctaattactttgctgcttcaaaaatggacctaacgactgaagataataaagacactaaaactagttgcaaacaactggacttgaatggattcagttggaactgatgagaagagaaaagacaatggaagtacacagaaagcaaggttactcaaatctctggcaggaaacaatgtatttactgtaaacaatgtatcagcttcggtttctttcagctcatggtggtcatgactagccaaatatgagttacttttagtagaatgcaaagttgcaactaacaaatttgtaagcagtacttatagtggatatagagtatatcgttttattctacaatatatgataatccaacaaagtttcagcattcaataagcaaatttaactattttccccaaacaaatactgttataaatgataacttcagactactaataagtctcacctagtaataaaaagaagcttacgatttaaaacaaccatgcataacacaacatcaacaatgtaaattgaatatgatagtgccctttagttcgtcgtggtttgtcaaccacaaagtagacaaaagctggcaagcagattcatgaagaaggaataaagttttcaaataagtttcaaggaattagaacacagattcataacagaacacttgaagaaagcgttccaatcttccacttgaatgctcagggccctagccatcataaccatgaggaagtaacacaactagcccagtctaacggagccacttagactcaccagaaatttcattaagaaattttaaaatataattctaaatagcccatactgttgagttttgacaaactatcacaaacattaaaattctctgtaaagcatgtgacaataaaagtaaattaaaacaagaaaaaatagcaagatatgaattcaaattttagaagcttaagacacatcacacgagtaacacaattagaaaaattcgtgtaaacccgattttcttttttgtaccatgatggaatatgttaaaagcatatacctattactaacagtaaacatctcttcattttgattcattatcacatggtcaagggggcaatatatctctacaattttccgatcatgaactacggcatggcagtgactaaacgttcctctttcaacatcctgaccactaaaccgaacacagttaccctccactatcaatgtggcaaaagcagtgcctctgcaaatccccagtaaatatttaacccttatttcaaccatctgagcatgttcatatatcctcatcaatgctttaggaggacaattttcgggtaagtgaaaaacacacagtcctactctactcatacagtcttcaataagcaacaatagaagtataaataaaaccctattcaactattttcgtcatactagcattttcgcaaacaccttatgggaagaaacacaaatactcagttttactattttcccgaggttgtaattctaatttttattagaaaaaaacgctaaaatcaaattgtaactacaacggagtagattggcgggttagaagccttacctgaaatggtttcaagcttgtctttggatttgattcttgttgcagcgcgtttggagagtgttaaacacgagaggccttcaacacacactgggttaggccttgatggagggcacgaaggaaatcagcattaggctgacggaccccgcgacgcagagtggctgacacgatgacagaatgggtgagggaaggtgcatgcattcgagtgttgtgttgctaagtgttggtgttgctgctaggttaaacaactcagcacgttctgcttagtgcaaaacgctgtcgttttgtgttcgtcactccaattcaacgacggtctctgagaccgtcgtggatatcattaagatcacgacggttactaaaccaaaacgcagtggtaaacacaatacaaagacgggttgaccgacgaccgtttaaaaatattcaaggtatttacaaaaataccaccgctcattaaataacaacggttgttacaggaacgtcgttaaaatgccgtcgtaaaactggccttttgtagtagtgtgagaatttattttttcaaattaattacaatgacatgaatttttgtaaaagttattaaaatgtcccctcaaacacatcgaaccctaattttcaactacttcgttcctatctttgtgttcaccttcattcttcaatagtccgtgttactatgaattcatacgatttctcatcgatatctctgtacttaggatttgtggtttgaaatccagagtttgttcttcacaaccagaacaaaaggaatgtgcgtgtgaggaaaaattgttattgaaagtaagaaccaataatagtccattccccaagaattaacaccgtctgtgaaaatatatgcggagggactgaaaacatatttttaataaattacatagactaaattaaacgatataaaaccttaacgactaaaaacaaaaaaagtgaaaatataaggactacaaatatatttatccaataatttaagccacataggtgaaaaaatctcacttgaattacgaataatgttattaattacaatcatcattttctattttattccatagatatttctgaaataaaatttaaatttatgatgttattaattaaaattaattattaaactatttttattgtggttaatgaattaattatttgtttttcttgtataggattaaaggtagtatgattgtttagctaaagttgacatctctggtgctccattcttgtgatgtgtttgaaaatcctaatagcattttttttttccaattattgtggtcaacttagaaattgtccaagtgttgaaaacgttattttgagattttccaaaatttaatttcccgaaataccacgacttgatgtttgaagttgctttgaattatacaaggaaattaaacaagatttcaaggaagaatcaattcaaatttgaatcaaggacttggaatccaannnnnnnnnnnnnnnnnnnnnnnnnnnnnnnnnnnnnnnnnnnnnnnnnnnnnnnnnnnnnnnnnnnnnnnnnnnnnnntctaaagggataaaaactgatagagcgtcaagaaagggagaattagaaaagaaaaaaaaaaagataatggttcaacatatcttagttacttgatcttagacaactcgacggtgtttgtataatatctcttaaccggtagagaaaattctaaaataagtgcagtattatatatagagattaagataaaaataataaatagataaaataaaataataattttataaaattaatcttaatattaatattatattaaaaataaagtgatactttagtgatatcagttaaacaaataattaatattatattaaaaagttaaatacaatacttatttcttttttgtgattttaacgaactaaagattaaattgcattaatatttattgagattttatcgaattacagaacacctcgtgagatttttattattagtaatcaatttctacatgctgtacttcaccagaaatccttccacacaaattttcacaactctttgatttagcagataaataaaaagaaaaaaaaaactgtaaaaagatgagtaatattaatacaaaaaatgttgtaaaacttattataaacataacttcactcgttagtcattacattctgtgtatgcatgtaaatcaaaaagtatatatacctaagtccatgaaaatttgttcatatatgttcatatatacctaagaataagaaaaatgaacagagtgtaaaatccagtagcaactttgaaaaacaaaattattattttccaccaaaaacccatcgcacactacctatcatagttaaaaacaaaaaatatcaccactccagaatcttcattcgcctttctcaacgttccaactttatttttctttaaaaacaaaaaaatcacccactttcattttcttattccttcttccttttcgattttctactccattgtaattttttattctcttggcttcttcttcttccttttttttcttcttcgtttcacaaccaccattcaccgtcgcccattgagccaccaacttcactcccttgggcaaccaccgtagcctctcgagccaccaatgccgcaccctcgcaactacgacaacccctcgagtcaccactaccactcgctagtaaaatcactgccggtccttgaaccaccattgtcgttctctcacacaaccattattagtgcgatgacatgagattttttcagatttattcaatattcttttcccgctttgtattttttcatatctgttcatttttcttgttcttgtgattatttttcctctttttgtatgtgggtggattgaaggtagttgatgttgaataatagttttttaatattaagcactcattttttatataagaaactcattttattttaaaggaatgattcctttcaagtagattgtctttggtgcacaagtttttcaagcacccctttcttcacatcaagatactgacagctttggagatgctcttagatttggttctctcttgtggttttgtcacatgatgaatctgacacggtacaaagttaaaccacgcagggtggaacaagagctaggaatcaaaaagaacgccatgcactccctcaccgatctctgatccggaagcccgaaaatgcagttcttcctcacatcaagaacaccccttttaatcagcctcttgcacaacggtcccactttggtaaaatagctataagacaacgaaaaattcaccaaattctccaacgcacacaccacttccggaacctgtccgtacaaaaagttccttgccaggttaagctgttccactttcttcaagcacccaaatgaccatggaattggaccagttaagagtttcccactaacatcaaacaatgtgagatttttcaagaaaccaatttcataagggagacaatatgttaaaaggtaagggataataaagttgacttggtggtaaaggaagaagtcgtgtgttcaaatcctccagacccttctaacaaaaattaataaatcaacaactaatatttattgatccagaaaataaaaaaaataaaaaaaaactgttaaaaggttgctcaatagtaacacttcgatcaacgtggacgaggctctccaatgctgcgtggaatggaaccggtgaatttgttattggctaatattagataaacaactggggtgttgccaaggttgttgggaagtgtcagcatgaaattgttgttgttgagaaaaagaacgtctaaagtttgcatgaaaatttgcgggggcaatgtgccggtgaaggagttgaacctaatgtccaaaaaggatagggttgggatgtggaggaccgatgtggggaacagcccagagaacaagttgttgctcaaatcaaaagctcgtggaggaacttgagtcctgtgattttcggcgaaacggtgccggaaaacttgttggagtttgcatggaagagagctaggtcagggagttggtggatgaagccatctagggttggagcggtgagctgaaagccgttgaagtcgatcgaggcggtgaggttgtccggtgggttgtcgcaatagaatcctgtgtagttgcatataggttcagaccaacccatgttgatgttactccgagagggtctgaggttattgtgtttttgaaggtttggatgattgggaagacctgtgcgagcctctggtctatgaaggttaaagtgttggggaccagtggagttgaatcggttgggggtgatggagtttcaaggatttgggaatttactaagacaaggtgaagaaagaatagggtgaggaggagtgttgaaagtgaagctagttgcttaaataaaaccatgctttcgatttgtgagggaaggacacggttgaattcatttgtgttagactattggttaatgatttatagtagattatgatgtttctttagtcatatatattcttttatttatttatttagaacacgcacatttttttaaagataattttattatagttgaataaaattattatgaataataaagataattaaggatgtctctaagttgttttagtgtgaataaatgcatctcattttaataaattcacagcattgttttttaaaaaatatattatatttatattcttaattttatgtgtttgaattcccgatttattctcttctaaatataaactaaatgtattttttgttttaataaaatcatgaatattcatcttaaaatttttatattttacatttattaattttatgaagtgtgatatagattgacagacggtgtgtcttaggacgaaatggagaaaaaatataaatttattgaaagattagacccattattatttgtgtgttcccattaatatttttttttggtatttttcatcatcatttctccctcctttatttgtaatttcttcatatctattattgagttcatctatcaccaactccaattaatttagatttaaaggtgttgatgatgatgacaattcttaattttatgaatttgaatcattttctcatttttatgcattacatttattttttaaataatttgttttcaccaatctcgaaacttaaatttgttattgacaaaatttccattttaaatatttaatacaattatatatcaacatttgaattcaaacttataatgactgattaattggaatattttatctactcacttagtgatatttcttcagtcatataatgaaatgattttaatttacatggttttcttcttttcatgatagtggtcatgtggcgggtattaagtaggtttgtgcacatttcgcactcggaacgaggtcaaggccaccaagaacttgtgtttggaagagtttggtaaggtggcattatgcgcgcaccaccaacttgaaaatggagcacatattgtggctttcgaactttgtaaagtaaaccacaaaattaaatggaacatgcgaactctttatgataaggtttaatttatacatattgtaaaccacttataagatccacttctaacttaaatggatgcccatcagttcagtcctgtcgctatataatttatactagtaagagccaaatgcaaaaggggatttaaggttcaaccatcttggagttttgtgaaattgcacaaatattttctgccttattaatatttatagtaatctctcttataggagagattagtgtaatgtatgacaaaatatcattgtataattttttaaaaattatgagttagtgtaatatataaaagagtgtatcggcgtttcaaaaattaagaatggttaatgtaagagtagatagaagcaggagaaattggtgcaatttcatagaacctcgtaaataattagtataatttactttaatttaaaagtaatatcaatatctaaaattgatttaattaatgtttgaaattgttgtaaaataagaattttttaaaaacttttagtaatacgaaaatttaatttttatataaaaaatatatgtgagagcaaagatattttaaaattcattaatgtaatttttatcttcatttaattattcaaaccagtcaaattaattttatttaaattgattaaaaaacgtttaacaaattaaatatgatcattgaatttatttttacctcaactccaaatgatactataggtcatcaccactgttttccatcaattcgaagttatgacttatcattttcatgggacttcaacttcaaagtgatttcgtggaccgttgttacagacaggcgaagaccatatcaaaaagactattaaggagcccatagccatatgcaagtaatttttgggcttgcatcacctgtcttagctagcccttctctctctctctctctctctctctctctctctctatatatatatatgtatgtatttttcattacaaaaagtgacatatttttcacatgacattagtttttataataaaaaaattgtcacgtcaaaattattttatacacaacttcccaagtgactgaaattcttatgaataaattaatttatgtactgtgtgaagggttggtacatccattcaatcataatattttaggaatgtaaatgggtggtgttcaaaacaacacaattatattttacatatagtattgagtcactgagttaggttgagttttcctagtgtatccaattggaaatgatttacacaacaagttgagaattttgaaacctgatcatagtcaactcaatgtaattatataagaaatatataataaataaaataatgatctaattctttttatgtgtcttatgtgagagttttagtgataaaaaggttaaaaaaatagagttgtaaaccaattttaataactttattaatactaacggagttgtaaaacaatgaactaataaaaactaactactagcttataaaaattaagaagtaatgaaataatactgaattaaattattaattttgagatatttgacaaagttaccttattgataaagcaatatatatatatatatatatatatatatatatatatatatatatcatttccgacttgagaggctttagtcctcaaataagagaattcaaccgcattggaaggctatgctaggcgaacttggagaaactcagatatcagtctatagaagaacaccaatgtcaacactctccaagaatcctgtgctaaattaccaatccatttcaaatacttagcagttcaccttgaacacatcattcaaatccatttcggacaaatntgtgctaaattaccaatccatttcaaatacttagcagttcaccttgaacacatcattcaaatccatttcggacaaatcaaaaatcaatttttgtattggtcttttgtcaaaatcaaagagaggaaaaaaataaaaataaaaaagcaagacacaaggaaggggaagaaaaactggaatccaaaatggttcttcttcattcgtcaatcgtgttatcttaatttagcaaaaactaaaaccttgatgacatgacccttacaaaaataaaaatagttatactaatatgaaaagggcaaaaataaatcattttcgaagcagcgcatttgagagttttgattttttattatagctacgatgcttacgtttgtctttgacattaattattagtcacttgcaaacaagaaatcactgtgacttttatggcattatactatgaaagaaaatcttcaatcttataaatcaagcaaattaaaattattaaacaaacactacatttacttatacacccaaattaataaattaagcttatgttatcatttctcatattttagttaaaccttttatttcgacgaaatattttagttaattaaaacatggctgctagatgaatgacttaaagcctgacaagtaaacgcctgaaatcaatatccgaacaaaacccttatcttcttgaatataataacacatccttctctttataaaaggaacatgactaagacattttaccacaagaaactgatgttgatagaagtggggaaggggcgaacaaagaacaaagaaaaatgaagttgtagtgtaccaaaaaagagagttagtgaaagacaaggcaactttaccatttgaatttgcttttagcaagactcatcattccatcatgtgatcgacccgaaacaaacaaaattcgatttgaaagatcacatatttaacactacccttcatccaaatatatataataccaattttattcgacgacttagggaaattacatttgaatgacaccaaacttgtcatagtcaagatgcccaattccacgacagtacttattcatgggcatagataaatacaaaataacaacagctaatcatgaaagagaaatatacaaatataatcacattaataatatgaacccgagtgaatcaagattcaaattcctcgagatatccacatctagtgtttggtgatgtctcaaacaggtaagatatatgagaaacaaaaaataataataataatatgaaacccaacacaaacacaaagtcccccacaaaggactaatatgagcaatctgatcatcacaatctcaaacgatgtggtttaagagtgttgtaagtcacaggctcagaaggtggaccagtgggcttgctctgtgtcccccagtgggatttacacgggacgtagtaaaatgaattctggttggggcatgtcttctttgttttgtaaaactggtagcattccttgggtgatttttggtctggaagccccggaatgcagtttcttgacacatccaaaaccttggacttgatcaaactccaacacgaaggtccaatttgcttgaaataattatccgccaaagagagattcccattgttccggatagaaggaatttgacaaaggttgtccggaacacaaccgtagagcttgttatgcgccaaattaagaaactgaatgctcttcaagcatccgaaggagagcgggattgggccggtcaagagatttttgcttacgtcaaacacgatggccttcttgaggtaacctatttcgaagggcagacacccttcgaactggttccccaagaagagcacctcattgagattcggcgcatagccgagactcttcggtagcgatccggagagtctgttgttggcaaatgtgaggtaccgggccggtgtggacccgaaattctccgggaggcaccccgtgaactggttgttgttgacaaagatcacgtcaaggtccctctcgaagagtttcgaatttatcggcccggtaagctggttgaacctgatgtccaagaagactaactggttgttctggatcgcttgcgtggggaactggccactgactttgttgttacttaggtcaagctcgaagaagaaagggaaggtggtgatgttgttggggaagccaccggtgaaggagaagttgttggagttaacgtggaagaatgttaactcgggtatgctgtcgacgagacccgtaaggggcaaattgcaaccgtttttagtggcgagttttgctccgtttaggtcaagtccagccactgctcgctctgttgaatttggatatgtggcgcatcgtacccctttgaagtcacacgtgtcggtgttctcgttccagctttgcgtgtaacagtctggatcatcgattagggttttgaacttgagaagcactcggcgcgctttttctaaccggctcagtggttttggtggagcaggtgggcaatatgcaggggaagatggagaaggagaaggagcaggggaactaccaccaccaatgatgatttcaagtgtttctcttttttctatttctggttcccctaatgcttcactctcggattttgctattgctacctcttgggctactactaccaccacccaagagcataataagaaggtgaagaaaatggagttggtttttcttgccatggtgttgaatgagaagtgaaaggggtttattctcgagttgttatttgcgggatatatatatatatatatatatatatatatatatatatatatatatatatatatatatatattatcgtatattatcgtgtgtgtggaagattattggcatgtggagggagaaaagtcaaggggggcttggatttgatgaagctgaagatattcttcttcactcacactctcagtgagaagctgtggttaagctttcactttccttgaaggacgatgatttgtcgcgcgtgctcgggtgggtcgccaagttgacacgttctccatctttttatgagccaaatactaccaaaagaaaaaagaaaaacagtgcaaccaccacaatagattagatttgactcataattttattttctggaatattttgcaatatatttagcattagtaaatattgtaaaccaatctaaatcatnnnnnnnnnntgtgaattgtcaaggaaaaatgcatgttaaatatttgaataaaaaaatggtttcatatcttcccaaactcattatttatagtggaaattaatagtacatttttctgaattaaaaataagcactaaatgaaatgaaataaacgtgaatggaagaattcgatttaattgcatttttatctatcaaatatttttttttcccgctagtaacattttttctattcaaacgactccaacgatcttatttaaagaaactaaatttagtatcactcatatcaatgatttgttggtgtatatatatattattaatgatattattaactcaaatttatttatataaatatatattagtatatacttataattaaaaaacatattaatacttctatctaaatagaaatataaatatacttacaagtgaaaattttgctgagcaaaagaaaattagtcaagcaggataaatggccctttacatttttatttatttatttctagctgaagatataaggactgaaaattgttagaacttctactgaaaaaatagatgtggtgttggcattgattgccattcatttaattttataccaagtgagatgtgtaaattgaaattcgannnnnnnnnnatatatatatatatatatatatatatatatatatatatatatatatatatatatatattatcgtatattatcgtgtgtgtggaagattattggcatgtggagggagaaaagtcaaggggggcttggatttgatgaagctgaagatattcttcttcactcacactctcagtgagaagctgtggttaagctttcactttccttgaaggacgatgatttgtcgcgcgtgctcgggtgggtcgccaagttgacacgttctccatctttttatgagccaaatactaccaaaagaaaaaagaaaaacagtgcaaccaccacaatagattagatttgactcataattttattttctggaatattttgcaatatatttagcattagtaaatattgtaaaccaatctaaatcattttgattaatttgaattaaattgtcaaatttatcgaggaccttgtaagaattaatttgattgatagaatagtcataacatcacgtcaatttaaaggagcttcatgatctaaagtaatagaaagcgttgtggatggaaggccaccaatatattaagacattctataattgaagcttcaaaaaggtgttaggaaaatctaattctgcaacatgaaaagtccctcagaaggtgaagttttttttatatggagagtttgtagggatgttatcccctcctcaagagttaagctgcaaaacagaggtggtgttattctgtgaaaatgggcttgaaatttgaaacatgttgcagcatttatttgttggatgtggaacaagtcaggcttgttggcaaaagctgttatatattatggagtaaagtgaaaacctcttttagatcactgtgaaagcttcactgacttgtgttttcatttaatcaaacaactgattgagtgatgaagatagtgcctttagtagcatgttactctggagaaatgagaaattgttgatatgactatggataatattgtggatggaaggccaccaatataaaacattcaatcattgaagcttcaaaacgatgttaggaaacttcatagttaagtacaattttcattaaatatttcaaaataaaaaaatattagaaaagaaaaatatattatgctaactatgttctactttcctctaaaaaaactatgttctacttgtttttgttgagccactgcttaattaattagcattatagtttgttgttaggtgaatgctaaatatttttttccccaagatctatccatgtcgttgggtaattaagaaaaacaaaactggtgcataattaagaaaaggtttaactattgctagctaccaggaggattatttttaagatttagtgaatattcgtattgatgatattgtttcacttttaaaattgaaatgattaagataagtgccaaatttttttaacactaattttaaattttaaaatatatcaaaagatttttttcaaatgtatgtactaattatagagtataattagtaatacttgttattgttagaagtaattttttaaaaaattaaaattatttacattgtatattaaatcaatgatgctagttccttcgttttattataattttcatgttaaaaaattattttttatttttttaatgtaacattaattattttttcttatatctcttatctattaatgataaattaatctttaaaaaaatattaataatgaactacaaaatttaaaaatgatttagtgataatgtaggtttaattttgtaaaattatttttttatctatttattattattttttagtttatgaaaaataattagagaataattattttgagacaaatagagtacttgagttcataattgtgaaattcggtccagtcattcagttagtcgagttaatgggttagtggtccaaatggtgggtcagtaattgacccaatttgatccgatatatattaaaattttaaaattatatatgtatttattatatataactaacattatttgagtaagaaaaattcatctatattccaaaatctaaaataataattgataataattcaaaatccaaaacctaattttttttataaaaaagaatccaaaattaacaattttgtttttgtaaaacatgtcaggctagactcgtccaaccgaaatctggtgacctaatcggtcaggcttgatcggattatcccaagccaatttcttgaccgatttaatagtggaattgactgattacgccacctaatcttaataggaattgtcaattggtcaaatcgaactaaatttcataattatgcttgagttatccattttatttattagaataaaatgttaaaattacgtaattataaatgtttaatgaatgttttcacatttcttgaaagaaaaaaaataacataaaaaactaataatatattatgttaattatgtctaatgattttgcctaacgttctagaacttccaggcacacaactctgtttaagatactgtaccaacaaactaagccttaaaccacaacagattttcccgagagataacctatcaaataatttcagttcctcataggcatgcattgccattcatttaattctgccaactcagtttccaaatataaggtgaataatcttccttgctacatcgtatggataatgaagagagagacagtatttgaattgaattatatatgaggttttctaaatataaataaatttatgttaacaaatctctttgggtaaatataattaaatatttaataataatattcattgtacctgaattgataattttaaagtactttcttatgcaattatatgcaaatgagaaaaactttttaaatcactgaataagagaacttgcaaattgaaaattgtaaaactatatttaattttttatgtgtagataatgctatccatactagtataatataaaacgtataaaatcaatgccacaactaaggattcaaatgctacagggatccagctgtcaaattatttagctacggggagaaaaaatattattagactcgtgaaatactttgtcccgtttgagagaccaaagacagaggactgacatgatttgcgatgttctacgatatcttgattgcacaaatagttaagcaaattattatctcttcaagctttttttttttaataaaaaaagaaaatatatgataataatatttatataaaatatttgtatatatcaaataaaataagttaaaaggaaaaaaaggtaaaaaaaacatttttattcaaataaaaggtgataataataataataatttaatctgattaaagaattaattatacagatcacacgacatcactaaaaattaaattattaaaatattatttattatgagatttgttttatatctttttattttctttttattcctttctacacaattaaaaactatcaaattcattatactcacctaaatacatataaaatacttcgttaaaaatgcatgtaaaataagaatttaatcaaaattattattttgtatatttataatatatttaaaattattagattatcgataataaatttatccattattttaattctctatttcttttttgcattttagtcctttaaagatttatttttctgtttcattccctactctcaaataataacattaatcaataacataacaataatattggtagcaattcattaacttatcataacataaaaaaatgtaacaaaacatttattttttaattttttatcaattaatttgagatcatcaattattttgaacatatgaaattttaaaaacataattcatctaaaataattataaataactaacatatcnnnnnnnnnnnnnnnnnnnnnnnnnnnnnnnnnnnnnnnnnnnnnnnnnnnnnnnnnnnnnnnnnnnnnnnnnnnnnnnnnnnnnnnnnnnnnnnatatatatatatatatatatatatatatatatatatatatatatatatatatatatattatcgtatattatcgtgtgtgtggaagattattggcatgtggagggagaaaagtcaaggggggcttggatttgatgaagctgaagatattcttcttcactcacactctcagtgagaagctgtggttaagctttcactttccttgaaggacgatgatttgtcgcgcgtgctcgggtgggtcgccaagttgacacgttctccatctttttatgagccaaatactaccaaaagaaaaaagaaaaacagtgcaaccaccacaatagattagatttgactcataattttattttctggaatattttgcaatatatttagcattagtaaatattgtaaaccaatctaaatcattnnnnnnnnnnnnnnnnnnnnnnnnnnnnnnnnnnnnnnnnnnnnnnnnnnnnnnnnnnnnnnnnnnnnnnnnnnnnnnnnnnnnnnnnnnnnnnnnnnnnnnnnnnnnnnnnnnnnnnnnnnnnnnctaatacttttaatatcatcgaatgatttaataagatgtaacttagttaatataaaaaatatgatttaatttagaaaaaaatcaataaactctgtttaataagtttaatttaatgatatacagtaattttttatttttattttttttgaagaaatagatttttcaataattgcatgaaagaagaaagttgtaacatgctggaaaagaagttataacatgtaatgaacacctatagtttcagataaaaaggaaatgatctattctttttatagaaaaaataaattattcgaaagtaattttttgtttgtttttgttaattattagcattaaaatctatgtaatacttgattttttttaataaaagaaagagtgagagaaaaaatgctaaaaaataaagtatttttaaaaataaaaataaaatgtattagaaaaaataaaaaatggaaatatatatcgataacactcaagttttgtttgaagtcttttatgtatgaatttgtacacctatttacctacgaggagccactcatgacatactaagacttatgtctacaacctacttttgtagtggcctaaaaattatttttatatataaatatagatatattcctctgtatagtatggactatggagactttgggacattgggtacctaattttttttaagtacttcatagatatagatattaattattattgccacaagcactccagagcagaagtgctgactaatattcatgtcaactaattctgaaactttgtttttatcaatattttctcgaggttatataatatgtgacaaattaaaaaatctaactaggaccaacgatcagctaagtggaagagtcaagtcttttaagcactagtttcaatcgtgcttgatgcagaaatttcagctgtatgaatctctaaactaatcataatttacccaactatacagtactttctgcttatttcattgcatattgaatattttttttattatttgagttttctttctccgagaagaattaatgtatttatatatgtaaaagttatttaaattaaaaatgattttataaaacttaattttggttaaaattacttttcaaatgaagtaatttatgtctgaatgttttaatttaaaaataaaattaaatattaatttttatatacaactcaaaagttgactaaatttacattaactcaaaattattttgatgtaatgtagaatatattttttgggagggactatatatgtcaaatgtgattatttaaatttggaattaggattagtttcatagtcaaaatgatttaaatttgtgaaaagatattaaagttttttttggaagtcaaatatcctaattatgataatttactaaaataaatattaattttaaactcaattaatttttcaacattaaatcaaatatgtaattttaaactcaattaatttttcaacattaaatcaaatatgtaaatttgagagaggatctgtcggtatagccatgtaggggcttattttgtaacctgaaggcctatacgtaccaactagtgatgcccgcgggcttaaattgacctaatcattttcaatattttagtacgttcaaaggttgttggattgattttttaaatttaattatacttttacttcttatacttaatttatatgtaatttgacacttaatttttattattcatatttaattaatgtaatttttaattgacatgattaaattcttacataaattttgattagtcactcaaataaaaaatttgatacctcacttattctactcaaccaactaatcaaatcagacaaattcccttgacaatcattaacaagaatataagttaggttacattaatttatgtgaattgtcaaggaaaaatgcatgttaaatatttgaataaaaaaatggtttcatatcttcccaaactcattatttatagtggaaattaatagtacatttttctgaattaaaaataagcactaaatgaaatgaaataaacgtgaatggaagaattcgatttaattgcatttttatctatcaaatatttttttttcccgctagtaacattttttctattcaaacgactccaacgatcttatttaaagaaactaaatttagtatcactcatatcaatgatttgttggtgtatatatatattattaatgatattattaactcaaatttatttatataaatatatattagtatatacttataattaaaaaacatattaatacttctatctaaatagaaatataaatatacttacaagtgaaaattttgctgagcaaaagaaaattagtcaagcaggataaatggccctttacatttttatttatttatttctagctgaagatataaggactgaaaattgttagaacttctactgaaaaaatagatgtggtgttggcattgattgccattcatttaattttataccaagtgagatgtgtaaattgaaattcgacttaaatatgttttgattgtggttgatatatgggaattatatttgcaaaaagatagtagaattattgattgaaaggaagctgcttcatgatgctttgaactatatggacctgggtgcttgaggcaacttaagaaatgactttcatttgctttgaaaaataaacgtttgattggtcattagactaactgtggttgttcagaaccacataatacgttatatatcccctctgttactaggatttaatttcttaatttgttaatattaatgaaaataattaatttattttaaatttatatatatatatatatatatatatatattaagattatcattatcattaatacttcactctcttctaatgatttgataatatattcttttcttttaataaagagtatttttagtctaaaattaattaatataagaaatattacagattgagtcttataaatagtgtcgcaacctgcctagccacgacgagacgacaatgaaaagaaaaagataaagagcctttctaaaaagaaaaacttgaggggagtcgtcaccaacgtttatttaaaaaaaacataaaaaaaaacaaaaaaataagacatggtctacgattttagagaaaaagagttcgagagttgtttatgcaaggagaaggtgttagcaccccacacgtccgtcacgaagacgacagcctttaatcgagtgtgctaaaaataaaatgactttttaattacttattttcccttaagaacatgaattatgtttttatttttgtttattcagaaaaagaaatcaaatttttatttttaggaaagagaagattttatatttttttttggttttttaggtcaacaaggggtttgccctcgctcttacttattcccaagtgcaatgaggaaatcagacttacgtagttctttttagaaaacaacttgattgggttaattttatttttttgaaagatttgtttcaattgcattgaaaatagtcgttaaggcgttgaaccttgaaacgacattgaatctgaagaaaaagcagagagaatcggttaaggcattggaccttgaagcaatctcaactaatatgtaatttttgagaaaaacggagaattgagtgatcctttatttgaagtttttttggttttttagaaaagattttgaatttcggtaaactttatgaaatcaagcaagtcggggacccaacataatattcacaaaatctatccacgtgttattgaaacaccaccaagcgagtcgaagacccagcataaagtgcacgaaacataagcacatactaaagatattaatacaaaaataaatgaataattgacgtaacattatgtaatcaaatgaatcaaatggaaatagaaagggatagcatagaagtggggagtacacttagtaattagagggtgcatataggaagaaagggggttacaaccaacagtgcttatttaattacaaaatgggccagacccaatagataaagggtgcatttaagaatatcgggatgtaaatatcattacgtgttttgtttcaaagtgggccaagcccaacaggtaagaggtgtgcaattatgaaattggaggtgcaaatagcatcacatgttttgtcaaagtgggctaggcccaacagctaagacgtgtgcagttatgaaaatatggactgtaaataacattatttatttctttaaagtgggtcaagccctaatagctaactgggccaagcccaacaacattatttaattggtttctgaattagtcaagtccaaagttagggggtgtatttatgaaaacttgagatgcaaaagcattatttaattggtttctgaacaagttaagtccaaagttagggggtgtgtttatgaaaatgtgggctgcaaaaaacattatttaattggtttctaaatgagttaagtctaaagttagggtgtatttatgaaatgtggggtgcaaaaagtaaaaaaaaatttaagggttgataccaggttagggcaacccaacacaaccctccttttcgctgttggacataacagtcatggtagttgcgcgaaaaaacatgggaaaccaccacgttgggtggcgaagcccccttaataccaccaagcacgaggctcggcggcatgagggcggtctgaggtgatcgcggctcgatggtggctgcgatggtggccgaaaagacaagctgagagacccctaccgattcctctgatgtgaagccaaatggcactgccaaattagttcctctttgccttctaggattcgtgccttcactctctccgcaattaattcccctctactgttgctttccttagtgccttttatcagtggcttcttttgacctaatgggtcgtgtgactctttttttttttcttttcttttttgctctttgtcacgtttttttttgttatcttctttgtatctggacagaattagggtatgacaaatagaaacaatggaattaatattttttaaatataaaaccattttgtgactttactaaacatggtattagaatattagatcccttgtggccaagtggttacgagtttgatctttttaaataatataataagaaaatagtatatcaattatgatgaatcaattgggttttggtcaaataatcagattcaactattatgagggaagccgggggcagaggaagattaaaagaaaaatcattatgcatgaaaagtgatggtatatgatttagaactagagttgatcttgatgaaccttgctcaacttgaattttgatattgtaggtttcaactcatagcattgttcaaatagggaacaacaacaaaagacatataaacatggttgttaaaatgtagtgttaaaacggttaaaacggacgattctacgtttctgtcttcaaaatcgtgttgaaacgcatcctgaaacggtttttgaagcaaataggttgaaacgacgagtcaactcggtaaactcgattgacttggtgagtttaccgagttgactgagttttttttttaaaaaaaagcaataaaaacatctcatttaagctttttttacgacaccgacaacttctcctcctttatgcgactgttggtgtgctgcatcttcgttcttccttcttcgtctgctgggctctctctcctttcttggcactgcatcttcatcatcaggtaggtgccttcactcttcaggcttcatctattcttcttttttcttttctttttttctaccctttttttgtgacttttgacccatttctttcttcccccttttttaatggtctctgatgtattatttattttggttgtactactcactactatcaaacgaagggaggaggaaacacagatttcttttcccgagttgtagtgttactattgtgctgtcaaatgatacttcaaggttgcattttttgtagctatgcttgctgtcaatcgaagggatctatatatatatatatatatatatatatatatatatatatatatattggacactttgtgcttgctggtttaggttgcattttccattgcttcataaatagagcccacggttgcatcatctgaatcaacctgaaccagctgtgcttgctggttcaggttgcatttcccattttgaatacatatgcatgcatttttttctgccaattgattgattttttatctattgttttttggctgagattatttctttgaaatttgattaaatatagtttgaaatcatatggcttcatcaagtgttgttggtagtagtagtaacactgcgacttctgtaagtgtgagtaacactactcttggaaggaagagattgcctagaaatgctcctggaaataagcaagatcctggatggaagcattcaattgaagttccgagaacaaaaaagcttaaatgcaagtattgtcccaaagtaatgtctgctggggtttttcgtgtgaagcaccatttggctggaatatctaaagatgttgaaccatgtatagcggtgccagaggaagtaaaaatagagatgttgaatcttcttattggagcacaacaagaaaatcaattgtaaaaaaatttggagtgcaatgcgcaagaagtacaagaggaagctattagtggtgctagtggtggcttcgatattttcaagaaaagtagaacatttattccagtaaccctcaacaccatattcaagaagaaattaagggaggaggcatgtcttgacatttgtactgctatgtataacaatggaatttctttcaattttatgaatatcgatgatttcaaaaagatgtgtaaatcaattgccaagcatggaccgagtttcaagccaccatcttatcatgagtgcaaagtaaaatacttaaagcaaaaatgtgatatgacaattataataaccttgagtcccagcgcgtacggcgttggattctgcagaatccttctgcataactatggcgctcttggcgccagggtggcgcgatcagcgccatgtttttgaggtgtggcactcctggcgccaagttggcgctcttggcgccacagtatctagagtgtcgcgctcttggcgcgggagtggcgcttccagcgccaaaggtcctggtggttgacgcctggggcgccaggctggcgcgggtggcgccagaccacccagaagacctgttcttctttccagttggcgtgagtggcgccattgtggcgcggtcaacgtcagagtctctggatatttgcgctcttggcgtgggttctggcgctagaggcgccatagtccctggatgttggcgctcttggcgcgggagttggcactcttggcgccagaggttctggaggttggctctctgggcgcggggttggtgcggatggcgccgtggtcacttgcagctggcgcgatcaacgccagagtggcgcgatcagcgcggcagctctgacaggaccactataaaaaggctgggtcgcgattttcagaaggaaaacttggttttcttctttctccagcaccccacctccattgttgaagctccaagcttcattccttcaccatagttcaccaaaacaagtcccttaaacaccttttgtgatggaaaacacttgtagagcttgaatccttcctcattctcccttcaacccactcattttgagaatccctttctcaagggaagttcgtagaactcgagtttagcgaggaacggcggcgattcgtggttacccaagctagggggagtcgtccttgggcctcccttgccatctttgaggtaagaaactcgagattcaccgcttgatttgtgagttggggttttgggtgaatagtgacccacttgtgataaagctagtattagccttgggtcctttggaaacatgtgtttagaatgttgtgaggatgtaggattagctctcaattgtgagtttagtgaactttgatttcttggctctatgtgatgcatgtatagtgatatgctgagttgcttggctgtgttttgacatgcaagagccttggtttatggctttgatggccttgggaggctattggaacggtgtttgtgtgtgaaagaaccgttcaagccatgtgtgagccattgagccttgggcttaagtagagctttgagctcttaatgttggcttgcattgagtcttgtgatgactcaagtgtcgtgtgggcatgaggtagaccatcgagggtctatgatatggctttgagtgttgagccttgatgaaccttaggttagacgaccttgtggttttggaaaggattgtgattcctttcattgaagcggttgagaatcgtgttatgcttgtatgtcttgtatggctgtgtggatgtttaatacatatttgtatgccttgtttagggcgtgacaccgcgggtgtcagtggcgtaggccacggagcaagggaagaaccgcaaagctcggctttgccaggtaagttcttggtcccttggggatgtttcccacttgcttgtgctccaccatactccgaggcagtagtggttacattcatgatacatgcattattggttgttgcatactcatgatgatatatgcttgtatctatgcttgagatatgtatgaagcctgttattagatcttctggctagttagatatatatggacctccctaggagtagagcgcacctcctagtttggtttgctcatggttgattggatcccgaggtgatgatgatcccctaagaccaagagataggtgtgtcccgtcgcggttgattgcctattctcggaggtaccatatacgtgcgtccatgcgtaaggggtagctcccgatgggatggcacgggtgtgaattccggtttcacactgaggtcggcgttgactcgatccgccgtacatagagctagatagcttgcttgtattgttatgagggtcgggaggccagtttgttgtgataccctgatgacttgtgtcatggtgagtgagccagggtggaggagatgcctccaagaaccctgagcttactgagatgtttatctcacctcgtgtggggcttatgttatttcaggtgatgcttctggtagagaggagcggtctcaaggcgggaggccccagtagagacggtacctgcttggctgtgagacagcagtggagagcttggagcttggctcagctttgatgttttgtacccctgtagagggaaggcatgtgtgtgcacatgtagcctttgttttgtacatgattatgtatgtatgctctcgtgtgaggaaggatcattgggatcagaagcacgtgggtgcttattcttttgtatagacacttcgagtgtcagatgatgtattttgtacataaccagtttatgttatgtaatcatgtttcctcctgtttatatctttgagatattgtatgttatctgcctatggttatgattgtatgatctggattagcaggggcttatcttaggcttgtgatgagatgtttgatatctcatacataatgtaatcaaggaatatggttttgatttatgcttcctcgaaaagtttttaattaatgtgtttaagcgctaatctgataataatcataatgttaatacatcgggtgcacacggggtgttacaacaatggctgttgttgatacacataaggctctatggaagaaaattggatgcacaataatgactgatgggtggactgataaaagaagaagaacaataatcaatttttgtgtgcataactctatgggaattgtgtttcttaagtccattgatgcatctcatatcaccaaaacagctagcaagacttttaagatgattgatcaagtggtacaggaggttggtgaaaaaaatgttgtccaagttgtgatagacaacgttgcaaattataaagcagctggggctttgttgatggagaaaagaaagaaaatatattggacattttgtgctgctcattgcattgatttgatgctagaagatttagagaagaaaatacccatccataaagacacaatttacaaggggaaaaaattacaacttatatatattcaagaacatctctcattccaatattgcacagcttcactattggcaaagatttgattagacccgccatgactcgcttttccacatcctatttgactttgaaatgcctccatgaccacaaacttcctgtaaaaagaatgttcatgtcagatgagtggaggaataacaaatatgcaaagtcaacagatggaaagcttattgaaaatgtagtgatggacaaaaacttttggaaaagggttgagatttgtttgataggggcacttcctttgattgaagtgcttcaattggttgattcagatgatgcagccatgggctctatttatgaaacaatggattgtgccaaggagaaaattgaagcggatttcaaaaaaaaaaaaaaaaacctacattgtaagttatcaattaatttgtttaattcaatgttatagacatttttaactcaaaattaattcaattgttatcttttcacttttttagttatcaacctatttgggatgtcattgatgcaagatgggaaaggcaactccataggcctttgcatgctacaggctattaccttaacccaaaacaacattattctcctacattgaaagttgattatgaagtaaaggttggactatatgattgtgtaaaaaggatggtggcggatgcaactgtagaaaaaaaattgatgagcaaatggaggaattcaagcatcgtcaaggtcttttcgggactacatttgctatggatggagttaaaaccaatagtccagcaacatggtgggaatcttatggtaatggtgttccatagctccaaaaatttgctattcgtgtgcttagcttgacatgtagctcctctggatgcgagcgaaattggagtgcttttgagatggtataattttaatatgaattgcattttatttcaaaaatatgatattagtctagtgttaaattatttcttttctttgtttaggtccacacaaagaaaagaaatcgtttgaagcaggagacaatgaataatgttgtttttgtgatggctaactcaagattaggcaagataaaacatagagtgtctcctcaaattgattataactttgatgacattgagtcaaatgatgattggattgtggaaccaacatatgaagaatttttggaaaatgttgaagaagatcaagatccccttggcttggatgatccaaatgaagaagaagggaacttgaatgatttggaaattcccgattttattggtgaattaaatagtagggaaggggatgaagaagatgatattgacttggactccaatgacttaaattagagatgctgatttcttttatgattttattaccttggtgtcttgattttagtatgtattatgatgactaagtttgaacttattttatttccttagtatttggacttaaatttgtgataacttatgtgttggtatgttttagttatatatatgttggatatttatttatttttgtatatgtagtaaattcttacgtttcatttacatttcatatttttatgtttttgctcaccccaccgtttctgcgttgacactacgttttaacaacattgcatataaaccaagccgagcatgagacattgcaaccaacaatcttctaattacatcacgtaggtgaccaacaaataaagtgcaattaatgtttctgaatagtcccaaataaaacagtaccatcactgatttagcattcatgctaagtaaaattggtcccaaataaaatcatgctatggaaaaattattgtgtctagactcgctctgtctgtatctttatttaaaaaacttctaggctcaactataccagtaaccttttcaagtatgtaaagtagtaatttcaaggtcatgctacatatatttttttagctttctaaaatcatttattatacggatataatcatttacttatttcgttttcttctcttaacttagcaacatacaattttgaggattagatgacaacatcttttagggattattttggatctatcgttcttgtttctgatttatatttagcagtttgtagaaatgttgtcccatgcttacaggcttgttctgatgtgtgcatagatgcttaaataacactgtctcctctctaattttaaaagtttcccttaatttcctctaatgagatatgactatgagctaaacttcaatccattttagtataatcggatctaagagaaaaccacattaggctagtgatatctcgtatatagaattctaaaagttgaattgttagttatgaatacaatgttaaaactctagaagctaattagaacacaatcaacgtagcagctttaagtcgttcatactatcaatgattttccttctattttgccttcacattcccacacgcacgacctatgtatatgcaaattgccaatatcgggggcagaaatatggagagtaataatagtttaaagagaatagagaggtagatatctttatgaatttgtcctatgttcagttcaacagtcaacacctcttctggtgggagaaatatatgtctgtccccttaacagattctgttgatttttgaagcacaacattcttgaaattaatgacttcttgaacttaagagaaagacctctgcattctatccccattcaagatactccatcatttcattgacggagaaactcttccttggacttggttctagccgttgctttgggagctctatgagaccttaatctatttttgatccgtaggaattgaagacaggtaccaggagagtttataacaactcagcaccttgtttaaccaattgaactagacatattcggtctatgagaccataatcttgccttaaaagaatgagtatcagccatgttatttgggaaattcccatattgccttaggaacaagttattagtgcacacactattcgcctatttggtgttttaagcacaactgaaccacaactacaagaatttgtgaagcgtggagtgctatgtgctgtagagaacctgcagttttctcctcttggttcaagagaaaaccacattaggctagttgatatctcatttctagaattcgttttttctttgaacagcgaatttctactttttaatatactaatttgagaaatttgaacataacaaatgaattggcaaggatagaattatttatgaacttaacctagatattggcttgtcatttggactaatcagtatttatgtcctgatattttgattccaaatgagcatacatttttaactttaaaatgtggggaaactcagttctatccaacttgagattataatatactcaattcatgtatgatgttatgaatatttctgtttttatatattatactggcttaatttatatactggtagcaaaaggttatcttctgctactgtaattatttaatatgctcatctaatgccagcttttatgattaattgtgtattgtaatatgctctgttatacttattcttataattggtgtaaattgtaaaatattaagaaagacaaaaccacaccagaataggcagaagaacacaagttacaagcgagctcagctttggatgtcaaactcgacagtttgaagctccaccttgggttggaacactttgcaacatcctccctgtaacaacagtaacagtgaagcaaaactcaccttatgttgtataaagcatatctaataattagttattaagttcacaggacttcaatctattttagttcaaatcgttgaaatttagatagcaaaacaacatactcaatggaaatgcactcaacatatgcatattagctgttgttgcggcttgcggggtatattagtggttcaatgaacttaactcctcaattaaagcttccaaatcagtttaagatgatcctcctcctttcatgccctgcttagctaactgcgaaagcacctttgttctgttcctcatttcaatggcttcttcactgcctcctccactgcatcacatgtattactatctccctccaatcgaaccaattttgtagcaccaattggcaccccaatttgaaggacctcagtcaccaacttctcattgaaaatttggtcggcacccataggccaattgatcatgggaacccctgcaatcactgcttccaacgatgaattccatctgcaatgagtcacaaacacgccaattgcttcgtgttcaagaatcaacacatgaggcgcccaccctcttttgaactttactgtgcttccaaagcatacgtgaacaactgaattgggtttctttgtgtcaagccattgtaggcactcatgctcctctatagatgcctctttttctctacgtgctttctcttccttgtctttgctgcaaagagataagggaccaatatgccacgattttcttccaagcaggttcctggaatgatctgcatagaccttctcaagctcgtagaagctattaacaacaaccctatagctcctcgactctgattcctttgctttcgccaacaacttgaccacaccttttttctccttaatctcggtagaaggtggcagctgatcacggcttggatcatttccatcaaagttgtgatgatctggaaacatgtgattatatggtttctcagattctctctctactcacccattttttcttgtttcaatctcttgtgattacagatttacagtatggttggtgaaggcacatccaagggacgtgagaatcaacagagagcaataaaagatcagcagcagccaccaccgtctgcatttagaataggtgaataaaaagattagcctaccgagaaactaatttaaaatttaaaactgacttattcactaacagcactaaccaattcaaattaataatcaaaactctcttgacaacatttaaggcacgttcaacaacactcctccttgcgttggaggatgtaaactcgtcttcttcataaattcaacttgtttatttacattgctgaaaaactattgcttctttcacatgtgattgagtgttggcattttcaactttcaggttcttagtcaaggactttaaacacttctcattctgctcaattctttcatctttctccttcaaatgtatcttcttgtttgtatgctcttgtgcaatagctacaaatttttctttagttgaactactttgggacttaggggctgctattttagaatttgtttatttttcttcaaatttctgccttttgtgagacaatttagtaatattctcttattgaaaaataatttgttcctcctttaatggatttaaagcaaagttttttcctctcatttttaatttgggaatatccttgtcttctgcatctataatcaaacaaattttattttcgaacaacacttcataacctttctcaactagttgtctaacactcaacaaattctgatcaattttaggaacatacaacacatcaaaaatgaattttgtacctttattggttgagattgctacagttctctttccattcacaatgatgaactttccatctccaacttgaaccttcaatgtgcttatattgcttagttccttgaataaatcattgttgtttgtcatgtgattagtaaactcactgttaataagccaattttgacttgattcaatactagagaaacacatagcagcaaacaggtactccttctccggatcaacaacctttgcagcttcattgtgtggttgattcccatttttgcaaataatagctccatgcctcatttgattacactcactgcacttagcatcatgtcttttccaacatctggatggaggatgccctttctttccgtagtgttggcaagacggataagatttcttccaatttccttttgcaatggttgatgttgaaattgatcatgttctatcaaagttcttgtttttcttgtatttggtcgcattctggtgcttggctggtaaagctccttcaactgttgatttttccttcatcaatcttctttgatcttgggtttgcaaggtatgtatcacctctattaaagagatcttggacagatcctttgtaatcttcaaagtggttattgatgcttcatatctctcaagcactataaccaaaaaattttcaacaagtttggaatttgcaaatgtaatgcttagtaatctaacattgttagcgatgccaagcaatctgtttgagtaccctttaattgtcttggatccttcatcttttgcacctcaaattcctcaccaggtttagcacttgcatgccacgaactgctaatccccttcatattctttctttaaataatcccaaatttctttgggtgaattgagggtcatgatcctagtgtagatcgtttgagaaacaccagcaaataggcatgttatttccttcgccttggtttttttctcctggtgatgctttatttgagccatgataggatttcaggcagtgaaggcacttcataatcctcttccacaacataccacaaatcaaaagattccatgtaggacttcattttcaccttccaaaggtcataactctctccatcaaagacaagaggagcaatttgtgagatactagattcaacatccatttcacaagtctctcaagaagagagctctagatatcaattgttggttttaatttgagggaaaaaagtaggagagaagaaaaaataatagagaggaacgcgagtttaatttggaacaactgacataattttttattgaataagcttcatatttaaataatttaaaataactgaataaaagaccatgttccattattttaggaattgttaatttaaaatagaatcaaaaactaatttaaaatttgaaattgtcttatttattaacagcacaataactaattcaaattaaaaatcaaaactgccttgacaacatctaagacacgttcaacaacacttacattgcaagactgcttctttcatgatccaccccgacttgaggaggttttttctttttttttttttagtttctagtattttttttcaatttcttatttcgatacttttgttgttttcatttgagcatttgcttcaattttgtattttattttgatttcattgaggacaattaaaggcaaagtgaacttcaacctcctctcttgagtcaaataaaagggataaaaagttattcaaaacaaaaaaaaaaaaattgacccaattacaataagagagagaagagaaggaggaaaagagtgaagttcaaagtgaataagattggtgaaagtaaaaggtaaaagttcccctaaacttttagttaattgttattgaagtcctttgttgcttattccttttagtatctatctcacattataagtctaaccccattacaacctgaattgcctcacttgtttgaaattttttagtgtctattagagttgagttaattgattaaaagaattgtgaataagtgtcttgaattgtgattgagtatttcttgatatttgataccactcagagattgtgagaaaagtgaatcaataacatattgaggttattgtgcaaaaacaactaagcctaatgattccttaagattctatgtgacatgaagtgttgaatgttttgttaaagaagtacaatgaactctgttagactgttacataaaacttgattgggggaaatttgcttaattttgatatgagaattagaacaattgcttgagaacaagcaaagctcaagtttgagaaggttgataaattagattttgagatcacctttttatttgtagttttaggcctgttacatgcatttatgatataaattgttggtagaactcatggtttgcggttagttttattaaacaagtaatcagggagcatttgtagaaaaaagattcaaaaacttgtcaaaatctgatgagccggactctaaccattcatcacaaccttgttcaaccatcatggtcgtgatcaacttgggcatcatcaatgttgtgccatggtggattgatcatgacccgacgcagatatgaatccaaaaaccatcatggccttgttggatcgaccaaggccatgatcaggatgcgttggctatacttaatcttttgttataatagtctcttttagaccctaggtttctagtctttttattcttttgcgattttgagaattctgaaaagcaaaagtgttgtttatgatcctttagccaaagatcacaattgaaaaaggttcctcgctcggattccaaaacctcttggtatgtttgggtttcttcttgcgatttctagttcattcatggtcatgaacaactcatctctctagtccagagataacgacgtaccttatcttaaacactttcttgattttaataagattctcaatgttttttcaattatttgatctcttctttgcgctttaactcttatttagaaaatgccattttaatacataatcgattgcatagtcgtgatcatctgcatgtaattggtaaatctaagaagaaagtgttttataccaaactacatggccaaactagttggatagtctccaatgatcaattgaaaactgattaatcacccttgtcttcgaacttaatcataattaaatatgtcaacgatcaactaagtattgtttaagacaaaatacattcttagatcactattaatagctaataattgattttgtgatgccgacaattgaccactgaaagaatcttggttattagctagatttcaagtttgctaatacacaaaggaaaagtagggagagatagggagagaattgagaaaaatattttttattttctttaattaaactttaaattactattttatccctaaaatattttattgtcttaaattttttttttatataatgctaatgtactccaattgaaaaaaaaggtgtgaatatgaacaaatatagggatttgaaaatatacaaagggcaaataggaggatgacaattctcacctatctttcttctgagttgcgttcatccaatcaaacacgtgccatcgagcagtccaagcaaaccgaaagcttagttgattgtagctccaaagatgtaaggagaggattcgtctgaaatatagctaaatctattattatccaaaatgtacatataacttcatagggccatgctgatattctagcgactacaataatgctacccgtacaggcattcgggttgggcatctccatgcatgggaatggtgcttatagctagctaggttaatttcgttatttgatttgtatgtttggtttggtattccatgtgcatgcatgccaagtgccaaccgttcttgcctttgccaatcttaccattcagacactttttagttgactctacactattctcgtatttacaattttgttatattgatatacaagcagttttgtctggaattcattaacttcagtttattttccatgttatgtgctgcatctttccttatgtacttcaaacggttagaaggtcaaaacttgagggggaaaaaacaatattatcactaagaactaaaaatgatagcgcaaaattaatgaaggataaaaaaatgtgtgaagaattggtgagactagctaaaacaaaaaatactatttttttagggaacgaatatttaaacctataagaaaattagaattgatttattaattgtagggtgtttttcggctgagaaatgtcagtacatttacgtaaaacacgacagtcattcactttttgttatgagcaaatgggcatagaactggatttaaagtacctgatcaacaaaagtatcgtgatctgattgtgtggttgctccaactcaaaaagcaatatacttttaattatgtaatttaaaataatatgagggtgtattttattttattaagatgtattttttaaatatgcttatatatgagaaaataaaaaataattatatattatagtatagtatatatatgatattaatattcaaataataaactaaactgtatacatacaaattattgagatgaaatttacttttctcaacaaactatttttcatagaaaatagttgatcattttcatctacataactgttgtcattctctcttatattacataaagtactggtttctatataatatttgaccatttaatttcgtacataattgagttttgctcccttataataatgtatcacatcactctatagagtaacttttaaaatataggatgatgatgatgttaggacatttataaataaaaaaattattaatatctcttaattttctnnnnnnnnnnnnnnnnnnnnnnnnnnnnnnnnnnnnnnnnnnnnnnnnnnnnnnnnnnnnnnnnnnnnnnnnnnnnnnnnnnnnnnnnnnnnnnnnnnnnnnnnnnnnnnnnnnnnnnnnnnnnnnnnnnnnnnnnnnnnnnnnnnnnnnnnnnnnnnnnnnnnnnnnnnnnnnnnnnnnnnnnnnnnnnnnnnnnnnnnnnnnnnnnnnnnnnnnnnnnnnnnnnnnnnnnnnnnnnnnnnnnnnnnnnnnnnnnnnnnnnnnnnnnnnnnnnnnnnnnnnnnnnnnnnnnnnnnnnnnnnnnnnnnnnnnnnnnnnnnnnnnnnnnnnnnnnnnnnnnnnnnnnnnnnnnnnnnnnnnnnnnnnnnnnnnnnnnnnnnnnnnnnnnnnnnnnnnnnnnnnnnnnnnnnnnnnnnnnnnnnnnnnnnnnnnnnnnnnnnnnnnnnnnnnnnnnnnnnnnnnnnnnnnnnnnnnnnnnnnnnnnnnnnnnnnnnnnnnnnnnnnnnnnnnnnnnnnnnnnnnnnnnnnnnnnnnnnnnnnnnnnnnnnnnnnnnnnnnnnnnnnnnnnnnnnnnnnnnnnnnnnnnnnnnnnnnnnnnnnnnnnnnnnnnnnnnnnnnnnnnnnnnnnnnnnnnnnnnnnnnnnnnnnnnnnnnnnnnnnnnnnnnnnnnnnnnnnnnnnnnnnnnnnnnnnnnnnnnnnnnnnnnnnnnnnnnnnnnnnnnnnnnnnnnnnnnnnnnnnnnnnnnnnnnnnnnnnnnnncttttttttacacctacaatatttttacttgttaagaaatccattagcatcacataatatatccattatttatattatttataacatctactaagaggtgcaacaatttattggaatgctccatggttcaagattcataattctcattttactttattaaattgaaacaatcatgtgttaatttatttacacattaattcatatacgtgatctttgatgtgtgatcgagaatgaatacttttgtcattccaaatgaaattgatatcgttgagtaaaaaggtaaatgtctaaacaatgaacttaaaattaatgactttattaaacatataaagtttcaaactttttattttttaaaaaaactaaaacgtgaaaannnnnnnnnnnnnnnnnnnnnnnnnnnnnnnnnnnnnnnnnnnnnnnnnnnnnnnnnnnnnnnnnnnnnnnnnnnnnnnnnnnnnnnnnnnnnnnnnnnnnnnnnnnnnnnnnnnnnnnnnnnnnnnnnnnnnnnnnnnnnntttttttttttttttttttttttctgggacatcattgtgaatacattccatttccatgcccttttttctctccttcaattaaacagtatcacacgttcatgtaggccaacacaatagaccagtgccctaattaggccaccgcaccaaagcaccccaccttaaatggacactagctctccaaatggtatattatttagatttcttgcataatgatataatgaattatccaagattcaaatagttattcaatcactaagaaactaagaatctgtcgtttccattacatatatgtgtatgatggatcggatttactatattagcttgattattgttttgtaatgatattaacatatcatttaactaatactaaaattagtaatacctatatctaaattcaataggactaaagttaatttttataaaggtgatgtagaaattaagatgtttattgatttaattctttacttattgtatatggtgtctacgtcaaatggacgacattagttctgacttttgagtactgctttataagatttatgaaggatatacgcttctccataaatttaatatcttagagacaatattccaagtataaattctttatattatacaatatttattgcatttgacaatctattcttttaatttaaaaaatgatatattgtttatatttcgagctctaattcgggcttctaaaatttatgaagtccaagactgggaaagccttgaatttttttctagatttttgtaagataagccacgatcgggacatgattaaattgaggtaaataggtcaacatttaatttgagctcaaaattaaaatttcaagctatacattcatcaatattcgagttggttcaactgacccaacgcattttgttgtatggtccaaatttgtggttcttatttttcataattagaagagttatcacattaactctttattgtgagcaatgcaaatttaaaatatagacaaataaattatttttgaatggtcaatttttaaagaaaataatatgacttgttttagatgtcatattataactactaactaatttttaatcttaatcatccatagttgtatgacttagatttatagtttttatttcttacaaacaagcataattatcacttgataggctctctctgtatatattgctctattttaattttaacacacaaacttttgctataagaagaattaaaattaacgatgaaacaatttatatgtattttttttataaaaaaatcattagaatttttttgtaataatagaattagataggaaataaaaacattttctcactaaatttaattactaactcattagttattttttcttcttaaattcacttctgatctttatgattgtacaattttaatctctaaaaaaaattaagcatttgatcgccaaattttgaatttcaacaattttgatcaatcattaatctatcatcaactttttaacgaaaattattaacataacatattaatgatgatgtgacattaatatactgatacatgatatgataatttgttggatattatgatatgacattgataatgttctcacgtaacattgacatgctaatatgaaattagaattgtcatcaactgtcaatttaattttcatctactatatcaaaatatcagtatcacattattgttaacatgacatatcatcgataacatgtcacattaatatttttattaaaaaattcttgaaagattaactaaattaagggaccaagtatacaataaatttttttgagcgataaaaaaattaaacagtagcaaaattataagaatttttttactgaattaaaataatagaaattaaaattcgatttaagtctaatttattttatagcgtgctggtgattattttttatactgattaacataattgatcttcgaaaacattttaaaaccattacgagatggttttcaatttactttaatcttcacatatctagtgctattaacataagtattttctaaccagcgtcaaaagccttttctataacctaactatacctaaacaaattaaactataaattaacaaggctttacacgcatacacacaacatatacgaatttgtatatgaataaactaattaactggtcaaatgctgtagttacgtgatcatggaaccattgtaacaccgaaaaagaaaagatgctaaccgtttggcgcaaacatgatgaattataaatgtgtctgtttggaaagatcgattatccactaaacttgttgagaatagactatatattagtaataatgaaatttttgcatagcatgaaagaagagaagacctagcttgtgaaaacatgcatgcaccaaccttataatccggttttgtgtttcgtcaaagcagatcgaacaacaaatgagcttgagaaaactaacagtcaacactgtaacgtgtgacacacaccgccaacttaccatttcctcctttgtactgttgcaccttttcaatatcattttcatataatttttattgcacagcttcaataattttgtaaattttaaaagtccaaaatgacaaaacatggattttctcccctttccttacactcagaaaattaaggaaacaatgaaagatttagcacaattggataacagtaaaactattttataataccagtgtgtaattctgatattattattaagaaactaactattttctttgaattaaaatctaaagattttgatattgacattaagaaactatttttcttcctcttatttcgaattcaattattgagcaaaaaaatagggttcaaagttcaaactcattcaattattgagaaaaaaataacttgttgctaaaccagccaccctcttattttcatcccaccatctcttctcccaattgaaccgtgtaatctactcgcctatcatgaggatcaatatatctgacggtaagttagaggcaataaatcatgcaacctcaccgccaaacacattattcattaaaaccaaccgtatgtcatatcctccaaatttggcaagaaattggtaaacaacacaaccaatttacactcccaaattcctaaatagtgtttttcattgcgctctctctctctgtctgaaggtgtgttgtgaatcacgcagtcacgtattagcaaaaccaccggtccaagtcaaccctttacacttccttatatccaaataactaactcatagtatatattacctcctttgatcttataacccctcccattcttctcgtgtgtcctcctccatatctcccttttttttttctttctttcgttctttctttttactctttctctaacacttgcttattatatatcatccccacctaggttcttccgtttttgtagctggggtttataccctttgaggtttgaaaggaaacccaagcaaaggtagaaagaatgaggaagcctagttgtgatatcaaagaattgaacaaaggagcttggtccaaacaagaagaccagaaactcgtagattatatcaagaaacatggtgaagtttgttggcgtacactccctcaggctgcaggtatgatttttttttattttttatgaacaaatattaatttattagtttttgttagacatatcaattaaaatatttgaatcctccacaactcacatctcctttcacccttctctaatcattgtatcaatcttatatctcctttgtaacgtgcatataattgttggaaaatcaaatataattggttagttctatttttgtggtgtataaccgtaacaattaataaagatcaaacttaaatttttatacattataattactccaatctcccaccattaggataacctagtgagtgattagtcttatatctattgagtagaaaaggattcattgaaaaatatatgaaaaacgtgaatcctatatctgatgtcttaataaatcaaaggtgtaagtgtgtaacaaacaataattataataattattgtaatacattttatgtatatccacacaagcgatagtacacacatacatgtacaaacgagatatatatttgaccagatacattttgtttgatgatgattaggtttagatcggtgtggtaaaagttgtaggctgagatggataaactatctacgtccagacctgaaaagaggtaactttgctgaagatgaagaagatctcatcatcaagcttcatgccctgctaggcaaccggtgcgaattttcaattctaaacataacataaccccactttttttgttatgctttggatgacctatacatgtgtgtatttgtgcgtgtaaaagaatgaaaagaattttgattataaggtagatatgtgtactgagcaaccatattatcaccactaaacaatataaagggaaacttaagttaacttttttcaacgtacattgctaaaagggttttctcacataattcattgtttggttgtataaattgtgcttataaaggaaaaaaaaaattcattgattaatattcattcgtacaggtggtcactaatagctgggagattacctggacgtacagataatgaagtgaagaattattggaattctcatataagaaaaaagcttattaggaatggcattgacccaaataatcatagattaaaccatacaatcccttccgttcatcagaatccacctatgtctgatggtagttcaaaaacctttggcatgaaagacaagaatagcaagaacgagacaagcaaatcacctcgtgtctacaaccatggtgaagtctcagatgctgcaagtggtgaggctgagtcatcatgtgcattgccagatttaaaccttgatctctctaattgcggaaaaaaagtaaaaccattacccgaatctaagtcgtcgaggaaagtgcaatttgattccccttctacacttcttctgtttcagtaattaatcaatcaacatcaaccttagcttgaatatggtgattcagcaaatcgtcatgtggagacgcatgcaagtgtgttgtgatatatagtatattgagatcttaattatcgacatggaaaaggacttagcttgtgttttattttgaagaatgaaagccctcaactagctagaaataatgttggtttatgctttgttacaaccttgcaatggcatacaaaagaactatatatagttggcaaacactaattgctgctatctggaaaccgagtattcacaaatttgagtgtgaaaatgagaagggtgtgtgtgtgtgtgtatatatatatatatatccatggaatatccaactattagcaaatagattgaatccattgaaacgtacttgtagtaatggcttccttgtgttggtcctgaagaagtgaggaccattataatgaatatttcaaatgtacaatatgtttgacacagatttggcagatatatattgtggcgttagaaacaatggaagaaatatttaatatgtacctttctatcagaaaccttcatcattcgggaactaatgctgcagtgaaaattgtttatttgctaaatgacaattccttttcgtaggtgatttctgggattcaactgcggttcacaactatagtgactcgtaaatataagacggaatatatatatgtatatatatatatatatnnnnnnnnnnnnnnnnnnnnnnnnnnnnnnnnnnnnnnnnnnnnnnnnnnnnnnnnnnnnnnnnnnnnnnnnnnnnnnnnnnnnnnnnnnnnnnnnnnnnnnnnnnnnnnnnnnnnnnnnnnnnnnnnnnnnnnnnnnnnnnnnnnnnnnnnnnnnnnnnnnnnnnnnnnnnnnnnnnnnnnnnnnnnnnnnnnnnnnnnnnnnnnnnnnnnnnnnnnnnnnnnnnnnnnnnnnnnnnnnnnnnnnnnnnnnnnnnnnnnnnnnnnnnnnnnnnnnnnnnnnnnnnnnnnnnnnnnnnnnnnnnnnnnnnnnnnnnnnnnnnnnnnnnnnnnnnnnnnnnnnnnnnnnnnnnnnnnnnnnnnnnnnnnnnnnnnnnnnnnnnnnnnnnnnnnnnnnnnnnnnnnnnnnnnnnnnnnnnnnnnnnnnnnnnnnnnnnnnnnnnnnnnnnnnnnnnnnnnnnnnnnnnnnnnnnnnnnnnnnnnnnnnnnnnnnnnnnnnnnnnnnnnnnnnnnnnnnnnnnnnnnnnnnnnnnnnnnnnnnnnnnnnnnnnnnnnnnnnnnnnnnnnnnnnnnnnnnnnnnnnnnnnnnnnnnnnnnnnnnnnnnnnnnnnnnnnnnnnnnnnnnnnnnnnnnnnnnnnnnnnnnnnnnnnnnnnnnnnnnnnnnnnnnnnnnnnnnnnnnnnnnnnnnnnnnnnnnnnnnnnnnnnnnnnnnnnnnnnnnnnnnnnnnnnnnnnnnnnnnnnnnnnnnnnnnnnnnnnnnnnnnnnnnnnnnnnnnnnnnnnnnnnnnnnnnnnnnnnnnnnnnnnnnnnnnnnnnnnnnnnnnnnnnnnnnnnnnnnnnnnnnnnnnnnnnnnnnnnnnnnnnnnnnnnnnnnnnnnnnnnnnnnnnnnnnnnnnnnnnnnnnnnnnnnnnnnnnnnnnnnnnnnnnnnnnnnnnnnnnnnnnnnnnnnnnnnnnnnnnnnnnnnnnnnnnnnnnnnnnnnnnnnnnnnnnnnnnnnnnnnnnnnnnnnnnnnnnnnnnnnnnnnnnnnnnnnnnnnnnnnnnnnnnnnnnnnnnnnnnnnnnnnnnnnnnnnnnnnnnntataatttaatgataagatcaattaaatttacgtgttatataaaattattaaataatataatgggtaatataaattatagcgatgtcattttttaatcatagttgtatcgatcctagacacatgaaacactgaatggacctcaaaagagggaagtaactataatctataagttatatttttcgattttctagaactcgaaaggggccataatatctaggatcttaacttttaattaattggatgttctaccaattgttgtttatgtgtcgtaatccggttctcctacttcaaatgtttgcatccttctccatttatccatatatctattcatttgctcttaggcttaatttagttaaattatacttcaatcgtagcaaagtttcgttatgtattagttaatttccctagaaaaaaatggcaccattgatggaggtctttcttcatataagacattattataaaataatttaactaattttattatttttgatgaattgaatattttttatttatttataagaacagagctaataataattaagaaaatttaaggacggaccatcagttagttgtttttagtacgccgccggccaatgctatgactagaccaatcttgatacagaacacaatcctcaagtaccaaacttttttcttttctttttttttttcttaagaaaagtgccaagcttaaaagtcaaataatttttaattcttaagcacaaagcaaaatactacattcgtctttaaggtatcgatcgctggagtgaaaaaaaaaaagtaaaataaaatatttttttgaattaaagtaaaatataaaagtatagatttgatttaaaaaatgtgggttacattttattttctttttcttttttcgttttctttccctgcaaacgaagacgacctaaatgtaagatatattttttcaatttgtttttcctttattataatacttttatcaagttatcttttatattaattttttatcaagggatctaatttagatgaaacatggtgtatgtgaattattataaatctatattatttgtcttaattatttttattaaaatactcttaatagctttataataaatgttattttcttctgtgatatagtaatcatcgtgtaagaaaaaaatattataccaaaataattatcattttaatttttcaatgtaatattaattacattttttcacttatatctttataatgtnnnnnnnnnnnnnnnnnnnnnnnnnnnnnnnnnnnnnnnnnnnnnnnnnnnnnnnnnnnnnnnnnnnnnnnnnnnnnnnnnnnnnnnnnnnnnnnnnnnnnnnnnnnnnnnnnnnnnnnnnnnnnnnnnnnnnnnnnnnnnnnnnnnnnnnnnnnnnnnnnnnnnnnnnnnnnnnnnnnnnnnnnnnnnnnnnnnnnnnnnnnnnnnnnnnnnnnnnnnnnnnnnnnnnnnnnnnnnnnnnnnnnnnnnnnnnnnnnnnnnnnnnnnnnnnnnnnnnnnnnnnnnnnnnnnnnnnnnnnnnnncaaataatattggcatcacattgcttctttgatttgcttaaataattcaatataattagagaacttgaaattttcaataaaactaccttatatacgtcaaagttctaaatttcaaacatcaaaaaacaaagtcgaatcatgaagtgaaaattaaaagcagtaaaaaacattagagttttataaactcaactgcgaaaaaataaaggaaattgttaacggaaaacaagagtaaaggacaaaaaataacaaatatatcacttgaagtaaacaaaaaaaagtaacacgaaatagagaaatcaacaaccacacaatataaatcgcaagcttcacgttatcttgggtaaaaatagatattttatgcctaaatatctaacattgatggtagaaaaaaaaaaagtaatgagcatgcctattatcaaaaatgaaaaaaaaaggaggtaaattatattgtcaactctgattctgaaagtgtaattcatgatcactttaggtctgtgaaattgacagtatcaaaatatcatatttatacgtgactattaataatgtacacatgacaattcaattaagaaccnnnnnnnnnnattttactatttaaaagtatccaaaaccagcacaagtagtattagattggaccaaatttaaaaccgatttccatgtatgtatgttggctttttttttttatgaaaatccaaatcgctcgtatactaccaacaaataattggatcgagtgatagtgtactcaatattttaaagtccaaatgaaaaatcatgattgaatgagaataattaatcaagttcattgatgaaatagttatcaattttgttaaaaagtgatatattttaattttataaagatgataaatatactaaatgttttattaaaatgaaatctaaatatttttaatattacgatgatgaaaaatattttttagagaaaaaaaatctctcatgtaccaaagaatacattatgataactatgacatactccgaaaataaagcactaatttgaatcgaatttactgaactctgatctccgaacaagggttaaggatcatttaagacgtggatataaattctgaaggactgaggagtagcagttaattatataggtacatgcattggtacactgtcagacaataaattcttggatggcctatattttagaaatattgaaagcgggtgggagacatgttttcattcgttttctctctcctcaccagtaagtcttaccactcaaaaagttagctacttgatctttatttccctctccatggctaagagatgttactttgagtttggaaagtcctaataccatgctgcaataggttataactaatcttcatagcaaaattatagctgtctaactgaaatatactttttttttgctagtgtaaaatttagagagggagggaatgtcactccaattcaaggcaggaaaatatagaagcacttacatttatgacattttaaagagacgagtaggaattcgaatctgtaacatgccagatgcaagaccatgtacgtcttgctcgactcgaccaatccttggggttaagtgaattgtagttgtttcctctggttggcatttttataggagaattgaaaatatttacctattctattttctactattttcatatcaacctcaaaatatattcgaatgaagtctagtaaagtgtcaagccaagaaattaagattgaagacaaacaaacagctagcagttaatttcatcattcttttaaggtccccttttgttccatgccatgcaaacaacatatatgttaaacgccccgtgattcaaaccactacattgttagacttgatatgatagagtaatttaatttaatttaataccagtaaaagtaagggatagaaaaaaacaaaaatataagtataataagcaacatgataccaactaatacagtaaataaaaaaaatgtttcactacaataaaattgatttatacctacaaacaaaatatgtcactatataatctgtaggtgaaagtataattgacttttacctatggacactttttccgtcaactttgaggagtcgtattgtgaaaattattagtctgtatgtacaagttttacctatggacatatttttacttagaagtatgtaaaagtcattattgatacctacaaccgctaattgtaggtaaaagtcattaatgtatacctataacatctaattgtaggtaaaagtcattaacatatacctaaaacatccaactgtaggtgaaagtcatatcacaaaaaaaaagtgttttttctgactgacaaaatctgtcataacttaaaaaattcgtttgtaaattaatatttttgtcggaaatttcctatggatgtattcgtcagaattttctgatggatttttccatcggaaatacacgtatggacattagcgatagatttatgcatcgaaaacttccattggtaactaattttatatgattttttattaacttttttaaataaagtcagttatttatgaatattttttttcatttgtattatttaacgacaatattgaaagtaagacatacatgcaattaatgaaatattcaaattcattaatctcaaacaaatgttaaaacaaattaactaaaattcaaagtacatgtaagctcaaatgccataagtccaccaacataataagtattccttgagccttgaagctcttactccaacttttcatagaatctgtttctcatatctggattcacacttcaaaatttagaattctagcttgaaatgggaaaatgaattttgaaaactactggaaaaatacattggttgctaacatgaggaaaatacttaaagcaacattgaagaatgaaattttcaacttctcccttcatggattctactgatttgattgcaagcttagtgacagttggtcccttaatattagtagagttgccataggaccagaacaagaatatgttactgtcggcataaaatttctgcatggcaactggatttccaattgtgctgggatcttccatatattcaccaaaataataaaatccaaccggcatacgttccaaacctttgatctttaaaattgttgtgtagtagtcgtttgtttctactttgctgaacaaatccttttcaacctcacttatgtccattacttctttttcaatctctaccacaagaaaagagtttgatctgatatactatcaacgtaaaattagactatcaactaattagaaattatcataaatatgaattatataacaattagcagtattacaaaagttaacaatgttatatgtcaattcatgattgggtgacagtgtaaattacattattagtgtattttaatttaacatattctaattaaatttataaaaaaacaatatttaaatatgaagtagtgacaagtgtacatacctaagcaagttgaaggcacggatttataagttcttccatactttaatggacagttacaagagttatgatcttatcaaattccatagtttcaatttcattcgagcccttgacattagcagtgacattgtagcatctccaaaccatctaactataaattaaaatatataaacattagtgtgaatcatgttctctatcataataaatataaaaaaacaaattttaatgtcagcaaaacttacatcacaaccactcttggcagccatcttcgagatgtaccgcttccaattttccctgtaccaaaccatgtatgaagccctgaagcagagggagaaggtcgatgtgatagtccctaacctcccagcatctaataaatggtctcagcttacggacccagttatcttctcgtttactgtgcaaggaaaggtcatgcacacccttcagcttcctgggagtacgtgggattggccgatccctcccaaattggcgcatgcatctattcggctgcgaatactcaactgcgtggaagcatataacaggagtaattgccatccacaacagtcgttgttgctcatatgcaccaagaaggtcgtactctccatatggttgccaaaccacctgcacatactaaataaacacacaattagataacgacatggaccacaaatgcacaatcaagaacacttaaaaataagtaaacgtacctcatcccgactgagggattacaatttcatcctataccagagcaactcgtgtgctcgaaatcggcctaaagcattaaaccttatttcaaaataactgacattagaatactataagactgaattccaagaattgttaaaaaaacaaaatatactaacacataccggtgtccgtaatgtcactccgagtaggctgcgaaataactagagcaataggtgggaatctcaaccacacccacacctaaagtagcatatgacacccaccaatatcacttttgcttggatctgtacactcgcacatttgtctaaacaaatgtgcaaggactgcagagacccagttatatcctccaatctcctcgaagtcccctgcaagcaatgggacgtcatgcactgcgaccatgctccccccggatctattgctcaggagccatgctccaagaagtcgtgcaatgttcgccttcgtaaagcgcatcacagcgatcaaatcgggaagtacctcacctcagtgcgcaaaatgtctatcaaagaaagacaagcacaaatattcacctctaagctcgatgtctgcctgaggctcatgaccaaaaacctcttcaatgacagtgtcccattcggcaacggtgaatcctgtaatgactttgccctcagtgggtaatcctacaataccagccacgtcttccaatgtgatggtcatctctccctgcatcatatggaaggtatgggtttccaccgctcaaccagagcactaacaaatgcaagatcgatctaaaaaaaaattaactaatcaattcatatgtacagttataaaaaaatgtttactcatttcctacttgcataccggaataaaaaattaactaatcaattcatatgtacagttataaaaaaatgtttactcatttcctacttgcatacctgaatatgtcgtatacatgcaacatgtagaaatccgtcatttcttaacatatcaccaacaatgtcaggaaaaagaagtttcaaagtggggagatgccacttgtaaaagaaggtttaaccatattattttattaatatagagtatgaagaaatcaaattcacgattaaagagtaagaaggtatatgagaaaccaaaagaaataaagtgaacttttattatatgtcacttaatgattgtgtataggatcagttcaaaaattacattagattagagtagccctattttacaactttttctttcccaaccttcaaattttataacagaaatactaaatagaaatcgtgtacaaaaagaaaataaatactagcagaaaattagaggcaactggtggagaaattagactccaccactgcctagagtaagagaaagccattataagctctgcaaaggctctgcttgttgagtccgagtgatcatgaacagcaaagcagaacaaaattatcacctaatggagatttttgctaagttgaatgaagaaatgagttggataagtcttggtataatttattgtaatgtcaacaataatgggtccaattaattatagaaaacgctttgttgtatgccaaaagaagaattatgttagcctaataatcatacttttatatgttttcccatatcaaaaagaaataataatcatacttttatagataacagaaagactcttaaaaaaaaaaaaaaaagaatatagataacagaaagacaacacgcttgttgattaacttcagacgtgaccccaacaattaatttgttgttcgtcgtttgtgatgcttcgtgggtgtggaattggatgaccattggctcttatccttccattttattcattcaattcaataaattattataaacactttctaaattccaacacaaaaaaacattccatcgtgttgcacatttgctttcctttcaaatataacaaaaattaaaagaaaataaattatattcgataaaaatgaaattaaaataattattaactcaatttcaaaatacttttacattatttttaatattaaaaaaaaatatttatgaatttggtattttgttttaaaaatatatatattgtcaccacctttggcaatggttatttccgtcatcatggtaaggaccatcaatatgagagatataagattgatttagtggttgttggaaaaaggtgaagggaggggggcaaggctcgacttacaattttaacaaaattaacaaattaattagagatgggaccaggtgggctggcccgctatcaatttggcaaggtggggtggagatcttggtccaccatcacattgtggaccatcctgcctaatccgttaactcgtcaggccaaaagcgaggcaagttgacccgccatcctgcaatattaattattttataaataattattatattaatatatgagactaatgaaaaaaaggggtaggaatggtcttttagttttgtttatgtttaattactttgtattatttaagattttaaaactagttttagagtttatgattttgtgttgtgatttatctacttggtagacttattattattagttattattgaagactattattattttatatggtttagatactttgtgtaatttaagattttaaaactagtttgttattttaaatactttgtattgtcaaatattttttaagagtttttatttttttaggctagcatgtccaactcgtcaagtttgagcgggtcaacccgtcctgtccctttttggtgggccagtaacagggttggccaaaacgagttggaccaacctattttttcatccctaaaactaacatgtgttgatttaaaaaaataccaccagtatcacaactaccataagtaccatcatcatcgacacaacaaggtcatcatcatcattatcatcgccgttgcagccattgtctctgtcactactactatcaccactattactttcatatgcatcattattaccactgccatcattgttgctagatctaccaccaacattattactacctctaccagcactatcaccattgctagcacgttgttgccaccaccatcattgtattgttgccaacacctaaaggttggctgacgaactggcttgtccttttaaaaaaataaaaactcttaaaaagtaattgacaatacaaggtatttaaaataacaaattagtcttaaaatcttaaatcacataaattatttaaaatcacacaaaatactaatattctttaataatagctaataataataagcctaccatgtagctaaatcacaacacaaaatcataaactctaaaattagttttaaaatcttaaacaatataaagtaattaaacataaacaaaatatacaactaaagaaagagtggatgaagaaaagaaatagacaaagtataatattatataaattattgtatgcatatcacttttcgtataaaatgaaaaaactaatattaatttatcatttaaaggatttggattaagatgcctagaataatattttcttattaatttatcaatagagtttttcttctgtttggacttttcctcaacacccaacaatataagctgtatttgaatatcgatttagtttagttaaacgccaataatcataacactaggattgacattctaattatattaaaaaagtgagaaataaataaatttaagaggaatgttagcgataaggtgaatattttttttaatatgatttattttatattcaaagattaatcataaatttaaattatgaattacttgattaaaaaatataaactattatcatttgtgtcaattatgttggaatgaaagatttctataaaatactttttttaaaaaaattcttacgaattagtgatggtcgtcctaaaaatactcgtgacaaattcaatctgctagagaatgatttctcgctgattttttagtgaccactattcatttgtaaagcattttgcgaaaaaaaaaattgtatctttcacaattttttctttattcacaaattatcgcatcagtaaatatccaaaaaattaaatcatgaaacaccatagataaatatcataattatgaatatgataataatgacattaaagtattctttttttatctgtaggaattaaatacggtattaaagaatttgcaacattcatgtatcatgtttaattatgtgagttagatctcttatgataaattattctatttttactttattatttttctgttcatttattctcaagcataataatttttttttttttaacgtgaaggatatgataatgataatgctaaatatttaagagggaccaacattgttatttctggtaatttacgaaaaagaaaaaagaaacctttaggacaaatacacacgtatgggtgatacaagttagaatcataataaacaaaacaatataacatttctaaactcatttgattagtatagtgacattctaaattataaataaaatggtttccaactaacccaatgcccaccaccctcacctctattgtatcgcttcgcctgcaccactgcaaagacctacatttgtaaacaagaaatgaatagaaactattgttatatttatattatattattataatgcaaaacttgtaatagatgatattattggtctgaaataatttatttagtgagataatttatatttggtatttttttatatataaaattttcttttgaatgattatcacacattaagtattaatcttggtccaaatgagttgaataacatggatgatttataatccaaaacataaaaaaataaagtgaaacttattttttttctttcttttttcttattggttatttaaatggttcatggttgtcttagtaagacgacattatgatggctttacaggttggcaaacgaccttgcatccttaccctttttttttctttcttcgtgcattatttataattagcagaaacaccgcattcctatttttctactattcaatcaaaatactgtaaaagtatatttggataaggtaatttaaaattttaagaattctaagaatttaaaatattttaattgaaatatttttattttcaaaattttgtatttgaataaaaaattaaatttttaaaattttgtatttgaataaaaaaattaaatttcttcattttaaacctcatgcactgatagacatgtaaggtggatgtcttggaagcattagaaattggagtacttgtcaaaattctaaaaatttaaattcctcatattaaaatatacaaacaaagaattttaaattctatgataattacttttattgtattaagattgttaactaatatcaattgaaacatttaagtagacaaaattatccaccttgtgttttttcaaactatacttgatactcctattttttataattatttttatatccttttattaaggccacatacccacacaaaattaatgtgaaataaagaaaacttattcttatgctaaccttggaactaataatgagaattaacatgccattatcatttttgtaaatgaatttccatgtatattttcatgagacaaataaaaagttataataagaagacaggataacaggaaaagttaatttaaaattgaaaattaatgaaaaaaagaagaagaagaaaacaactctatatacctatttatattagatcagaaaatctgttatagataaacaactactttatacacattttaaattttaaattctactgaaaagtgcatatcaataggataatttatcggaaaaagaaatgcaacacaaaaaatgaaaaacacactaaaattacatgttaacatgatgaaatttaataaactacaatagaatttgagacaataggagaatgagtggacacaaattattgatttattctttataattcaacttgttgtttttatgcatacagaaaatataggaaatcaaaatataattatgcatatgcaaaagtgagaggggaagaaaaataacaaaagctataaagaaaaaagaatttcggcaaatatatatgaaggaaaaggggatattttgagttttgttcagcaccacacgtgccatcaagccatgtcgccttgtttaaatttacatgctctgattcattgaaatcgtatatataattttattggtaagagaacaacgtgtaacacttaaaagaggcaagcgcaggccatgtcctatagcaaatgaagtgttatcagattaagaatccttgcacgctagggcaccaagtgtatcaagtcgaaccttcttcactgacatttgaaaacgaccaaataagaaaaacctctaaatgtaaaaccacgtaaacagaagaaaggcattaacaatatcgttggatttacttgttgggaaatatggaggaaagatttacattaatggattattagtaattatgtaagtgaattaaatatcatattttaatccaaaatcataaggattagaattatgggtattcttcttatctatatggtgttcaacttttttatttctgtcttatgtataactttacctcatacttatattctaatattacttcctgaatgcaatgtattatagcataatgtattatagcatttgataatatagtcaagaaaattgcaactttgtgaaaaagtgcaaaatatgaagatgatgaacgcccgatagagaaaataagtatgattttcacatgagaggttagagaaagtaacgagttttgttgcgcttttgaaaataatacaatatgggagaaggcatgttgcagctttgttaacaataagatagaattgtggggttagttatgtttctcttgagggtaaaggtgtctaaaagaaagtgaagattaaacaaaagatatctcatttatctaatattattataagttacatatgcttctattccagctagcaaccaaaatcatcatgacaaggcaaaatatcagagaaaaaacaaaagatatatgttacctccacacagcggcaaagctaactgttaaaacacgttatattaactaaaagatcattataataaattgtttttctttaaaaattatatccaatctcaaataccttgtcaaataatattggcatcacattgcttctttgatttgcttaaataattcaatataattagagaacttgaaattttcaataaaactaccttatatacgtcaaagttctaaatttcaaacatcaaaaaacaaagtcgaatcatgaagtgaaaattaaaagcagtaaaaaacattagagttttataaactcaactgcgaaaaaataaaggaaattgttaacggaaaacaagagtaaaggacaaaaaataacaaatatatcacttgaagtaaacaaaaaaaagtaacacgaaatagagaaatcaacaaccacacaatataaatcgcaagcttcacgttatcttgggtaaaaatagatattttatgcctaaatatctaacattgatggtagaaaaaaaaaaagtaatgagcatgcctattatcaaaaatgaaaaaaaaaggaggtaaattatattgtcaactctgattctgaaagtgtaattcatgatcactttaggtctgtgaaattgacagtatcaaaatatcatatttatacgtgactattaataatgtacacatgacaattcaattaagaaccgaaatcacaaaatatattgtcatcaattgtttatgagtgcaccgttaattgctacataggaaaatagtatgtaatatagacacaagcattaactataacgaaagtctttcaaccaaataaccaaattgacagacaaattacactctcagctatccaagtcatatttcgatactttcaaaaatctaaatgacagtgaattacatttttaatgacttataccccttatccaaatgattcatgatttggaatcttatttcaatctttgaatataaaataaattatgttggaagaaaagaattattttatatatatttatggtttattttatagataataattttaaaaataaatgaggagatctcaacaaattatattgaagaatatcttaataaataaatatcttaatttttcatagatacttttaagagagttattgattcaaaattaatatattagctattcagacattcttattcttaagtataaatgagttcctttttaattaaaataacttcatactaatatcattttcataaaaaaataaacccggtaacttgatggatcggaaaagaaaaagaaacggaaaagagacatgtcaaacgattcagaaaatattgtcaatttatgaaacttttagctagcaaaaagatttcttcaaagaaaaaaaaagctagcaaaagataggataatattaaaaaagctaaatccttagtttttcccacattatttataatttctataagaaaagaaacaatcagacctgtgctccacgttgccaacttgctgtcatgcggctgcgccgctgcctatgtttataatttatcgctatttctacgtacattgcgtaatgtttatatccaataaataattaaatatatttaaatggtaacaatatagttaaaaagaaattttaaatggcgttaatgagtaatgacattgttttgatgcgttaatttaatttattatgaaatagtaaattcatttatttaattgtataaaaattttctttatcaatagatgcatttaggatgtgcaagccggtagaatatttatgggttttttttaaaatctaattccaaatattgataggaacttctgtttaaatttattctaacttgattaaaagcttatatgaaataagactagttcaacttagtatatcgacacaatatataaattttaatattatgtattgttaaattgtaaaattaaaaaaacagtctataattaaagtatattttataatagataatattaataccaatataatattttgttatataaaatattatttattaaattatttttattattattaacctataattatttaaagaaattttttgtttttcattcatggtcagtgtaaatgtgtgattacattatcaattaattaaaatttattttaaatataatctttagaataacattaatatgtatatatatatattgtcagtactttttaattaaattgtcacataaattatacttttgaacatattataagatagtttcagtaaaaaataacataatataagatagtagacttttttgttgttgttgaatagatattagactaaattgagataacttaaaaaaattcgacttaaacatatattgagtctatgtaccaaaaaacatatattgagtctagtttctgaaatccgaacgtgtcaaatactcaaaattaactttggacctaaagtacgaaatagctactagctagtagcaaaaattccgttcaaagtctcaagatatcaaaatacatataaaaaaggaagaaaaaaaaacaatagtggttagttgcattacaattcataatattccaaacccaactgtatcctcttgtatcctttctctctctctatatcattatctccccaaatttcattttctccgagattctcgctttccccatttaaggcgtttaagttaaccctctcgagaatgaacgaaccaattatttaatggataaatagtgaaattcgtttttaaaagtgagataataataaattgaatactgaagtaaaatatgaaaatatataaatttaatttctaaaaatataaaaatatgacaaataaattatgaaaataatttaataacaaattaattcttaaattttataatttaatttaaattaataataaatttaatttattatcaaattaattattagttattataatttaataataaaataatctaataaatttaccaaaagaattatttttttacattttttatcttcaataattcaatttatattttttatttttcagaaaaactaatttttcatggcatgaatactttcggaaaaaaattgattatttgtccttatttaaattattaactaattattaattaattaataaaactacccgtcagaaaccgtattttgactattttcctcttctttttttatttcatttttctcagaaatggaattaaactaacaccattatttaatttactgattacagcattaatttagaaaacccggtgaacgtgaagcctcgcaagcaccaacacaagacattattgttacagcgatttacagtatttatttttgtaggtatcgccacttgataagtctcttcacacaaacaccttattagcatagttttaaaatatggactgatccggtccgtcggacctatcaaaatgcgatatggtgattggatcagatcgagtcataaattaaattaattatattattgacttgaagtaacttaaactgactcaagcagatttgtgatcgaaataatgatccgttaacctatattacttttttttcttcaatttattgtattttaattttttttgttgtgatcttaaattaaatttaatcttttcatttattattgaatatttttgtgatcataattatattttatgttgagttaaattgatttaaaaattatcattattatagttgaattacatgtaaaattgtgatttcaaaaaatcttttaaaattatgatttgaaattttagattatttttttatattttataatgtacatttatataatatgattatattttattttagtgtaaaaattcatatataatatcctaatgttattgatcttttttatattttatttatatttttaaaatttttgaattttgatacttttaaaaaaaaatttaataagatcatataaatcaaataatccactggttcaaccagtattctcataatccggtatcatgatcggattaattaaccggtaggtttttaaagctatgcttattagagtctctctaactttcctcagtttcctcgaacacaacacaacgttagccttacaagtttaaaccttagcagcgtcgacaatggccggcgaggagctcgccggagaccacacgccggagctgctgtgtctggtccatgacatcgccggaatgtgctcggtggtatcctcctccaccggcgccgccgacgccatgttccgcaaggactgcgctgatctggttcgccggatctccctcctcacccacctcttcgaggagattaaggaacacaacaacaacgttgtcggtggttcctcttcttcttcctcgtcctctccttcttcctcctcggctgcttcaaagtggtcttctgatctggtcctcgtgcttcactccgcaagacgcttgctttccgtcgctagaaacttccgctccaattgctcctctgtgagtttcacgatccaattccaaacgacgtcgttttgttcagtttttgagtagtttagatctgttgttcaaccagctgaaactgttaaagtttgagtttttttgcattcccaaaacggcatcgtacaaaaagaaattagtttagttttgatgaaattcgttataaagttcaatttttacttatgacttgtgagagtggatatttcgggaaattatatagtttttttgggattcgaattttttagtttagattggtgtgatgcgtgcaatcaaaccgctatttatggttatgtttttgtggagaaagtagaatgcttcccatatatgttactcatggcttgcttatgttctcattatgttgtttacaaatggggttggatttagttgaagagactagttagtctatcatagcgtgtcgaaccaatgttcaaattcatgtaaggagaggtgttcacatttagagctcgaccgtgtctcaaacaggattgcctcaaaagaaagaattgttcttttgtttggcattttgtatggtgttctttgtgaaattgcgtctttacaatgtgttctttaaaatagggagatgattttgcatttgttgaattattttaagttggaatcttatgagggttgaatttctgtgggcatgtatatgtgtaaggatgtctgtgttcatatctgaaatttggtgtatcttgatttaaggatggagctgcaaagaccattgtcttccaatttcagtgtgtgacatggaagttggagaaactgttgagcaatttgccatatgacgatttggacatctcggaggaagtcaaggagcaggtagaatttggataaatggggtgttttctttataagtattgttaattttatctacattttgcttgagtgaatttgcggatattttctggttttctaggtggatttggtgagaacacaattgagacgagccacggataaatatgggtttatgatttcaacgatgccatctcatgaattatcccagccactggctgaagaaattaatcaggttcttggcaaatctgtgagtaggttgcacaaacaacacagctgccctgaaaatttatcagaactagacaccattcgtatcgaaaatgaagagaaacactgcagcacaaatcctgccggatctcgcttggaaagaacaaggagcattcctactgaagttgaagtttccttaaatgcaactgatcctgaaagtcaagaaaattctgagacaaagagtctacctgaggttaaaaagactgaaggaattgtgattcctgaagattttctttgccctatatccttggaactaatgagggatcctgttattgtagccactggtcaggtgagttcatctcacacattacatccacaccagaaaaatatttctacaaattttttctgctcttctaaatttcctgcttatgttattctgcagacatatgagagatcttacatacagagatggatagattgtggaaatacaacatgtccaaaaactcagcagaagctccaacatttgacccttacaccaaattatgttttgaggagccttatttctcagtggtgtatagagcacaacattgagcagccaacaggactaactaatagaaaattaaagaagagtgatggatcattcagagatgttacaggtgacatagcagcaattgaagctctggtacggaagctctccagccgatctgttgaggagcgtagatcagctgttactgaaattcgatcgctatccaaacgaagtactgacaataggatactaattgctgaagccggagcaattccagttctagtcaaccttctaacatcagaagatgtattaacacaagacaatgcagttacctcaattctcaacctctccatatatgaaaacaacaagggacttataatgcttgctggtgccattccttccattgtccaagtcctccgagctggaaccatggaagcaagagaaaatgcagcagcaacccttttcagcttgtcacttgcagatgagaacaagataataattggtgcctcaggagctataccggctttggtggaattgctccaaaacgggagtcctagaggaaagaaggatgcagcaacagcattgttcaatttatgcatttatcaagggaacaagggcagggccattagggcaggtatcatcacagcattgttgaagatgcttacagattcaagcaaatcgatggttgacgaagccctaacgataatgtcagttcttgcaagccaccaagaggcaaaagttgccatagtaaaagccagcactataccagttttgatagatcttttgaggaccggattgcctcgcaataaagagaatgcagctgctattctacttgccttgtgcaagagggatgcagataatcttgcttgtataagtagacttggtgctgtcatacctctctctgaacttgctcgaaatggcacagggagggccaaacggaaggctacttcattattggaacatattcgtaagttgcagcaactttgaatggtgtagttctgcaaagaacttttaagtttcttctgttctcccattatttgacataattgtccacactgcggtttgcaaactggtcatacgaggtgaaataagaaaaatcagcctcattgattcagttattcttttcttggtttgctctttgttgacccgtgtatgagcgtgtaaagaaatcaattgatatattgttccgtatgaaattcttacaaaagtttctgttctctttgatttgttctcttgttgaaatccttagctgtatgatgagcatctagcccttatgctacctacaataactaaaaccggaacttgtcagaattatggcattgtttgaatctcaataaatgtaaataaacgtatccaactctaacatcgattttacccgtaaaggaaaataaacatcaatctttctttcatttttttctcaagtcaaatcatgaaagtgaaagatggaaagaaaaagagaaggaagtttatatgaatatcactaacagagtaacaggttcagaaaggaaagtttagacttctagttaatgccacaaacagaagctctatatgagagatgcagaagtacaataaccaatttcaatgcaccaaatgaatatgaaaaaattgttacttccagaataaaagtactttttggttcttttaactttaatctatacatgcagttagtgtgatggtttttaaaatagttagaacttaggattccatctttgcttggacaattcttctatgactcgtttcccattcttggattcgtgccattaattttcatgatgctcccttcgattgtgcgatcatggagttaattccctctggaccattgagatttgaggggaatttaaaaatgaaaaaaggaatcatccttcaaatgaagtgatgggagagattttgtggtcaattcgagagatctggcctagaatatctggcgcatttacttcagcaagaagtcatctctgaatcaaacagcaaggatttaactggatccagtttatcaggaaaagtcctcaattgggaaatgtattaatcattttacttcctaaagttataaaagaaaacaaaaaaaaaatagtccttaatattaacaacactttaatatctaatgttaaggaaactaattttctattttgacaactattacttattttgactcttgcattactcattttagttcataacattggtgcacattagggattaaataaatgattattactagtattaaatttaaggactaaattaatgaatggatatagtagtgttaggtaccaaattgacggatggtatcacttttgtaaactaaattgattaatagttgtaaaagtcatgactaaatttgtcttgaatttgatatggtgtaattttccacttgttcatgaataaaaaattattccacttattcattgctaatttgtcttggattatgccgacaagcagttaagttgcaagatcgaagctatatgtgttgcctaagatctacatggttcttggatggatctctttcccctgctaggtgtcactgtcctcttaaactgccttttgtttccaccttgtttgaaaaaaggttctgttcatatcttttatcagtgagtccagacatgcatgatccggtaatgatagcacatgtttcagtttaactttataatgacctttgcttgaagtctttttctactatttttaaatagtttttaactaaaagaaatgttcgaaattaacggtaattaaatagctttaattaaaacaaagattataaaataaaaaaattccaacaaaataaaaataaaagtttcttaataaaagtggaaaaaaaaaaactgtatcacataatatttccaacttaaacaaaggaaatttttaaaaatatttttatctaattttacttaaaaaagttttgtttaggaggaagtcgatcttagaagagttttctcttctaactattattgtatttataagattcaaatttgagattataatgaagagaatttaagtctaatttcaatctaatcaattacatgcaaataattatacagaaatcaattaattttctaaaataaaataaactaaacacatgtaaaattgttggataaaaactttatacatcaagaagcatctaaatcaacattcaacatatatgaagaatagtgtaatgtttctatgggtatatccattttaggataagttgcattatttttccacgtgttcaacatttcccatgttaagctaactggataaaacttatccttaggtcggcaagtgagctgcaataccacattccttcaccgaccactgctatttccaaagaaagcatgaaactcatacgaactcaggtgattggcttgaaaatagaaatgatgaaataagagagagaaaagtgctacggctcaaaatttaatgtgttttaattggttaattgaaacattaaaagttttggtatgccatgtaaattaaaggttctcagttctcacttgacaagagacccttcatcacatttgcggccttctatttcctttttcttaattgttggacttttagagggggaaaataacttattttttttttcatttttaaaaatttaagattacattaattatttttgtcaattatattcttactcaaattaattattttcacatttttaaaatatgaagtaatgacttattggtcaataatttggtggatagaaataaatataaataattaatgaaaagcgaaataagtggattggaaaagtgaattcacaaggaatatagtaggaaaagatctaacaattttattaaaattcaaaagttattaattttcttgatttgtgcaaataaatttaaaatttagaaaaagagggagtatacaagtgttattgccctccatttctccatattgtctctttcgaaaacgtggttccttctcattttaattcatttgttcatcaaaccccttttctagaaatattgtgattcccctctattcctacgttaccctttctttcaaaaattacttttcgaaatagaggtatatgttttttcaagtaacaaaagaagttatgcataatattggcgaaatgaaaatgcaacttcttcaagtaatggaacagtggtcaaaatgccatttattttaaaattatttggcaaaatgtcatggccaataagttatttggcgaaatgccacgctgtccaatttgctgcacccatgtgcgatctccgatggccacgtgtcaagcaagcattggcttcatggtcgggcagctgacgcagtaaattcgctgccagcatggatgagttacgtactccgctgcttgcatggacaaattagagcgttgctgattggacaatgtaatccgctgccaacatgggcggattaggatgcgccaagtggaaaatcgccacgcatggcagcgttttagtgtctgtgtgacatggaggtgctaaatcggtgatgggtccagcgatttttgtgtgttaggcccactataaattaagctggtccgacttgtccctttcataaaaaacattttctcctctccagcctctcatcttgctccctgaataccagtatcttgctctcataaataagtaagttattttgaatttattttggttatattttacatatttgatatattttttatttaaatagagttaaatattaaattatatttaggtttaagatttaaaatattagattaaaggattattgtaaacattaggttagaagattttttattgtttgtttataattaagaattgcatggttaatatattttatatgtaaattgttatagatattcaataatatttatatgctgatggtataaaacactagagtagaggatgaatataaacattaggttagatgatgttagtttataattattattttgtaggatacattaacaaaatatgggataaaataggaacaatttactagtttataactttaaagtttcagaaatttatttatttaattaaataatattgtgaaataatgtttatctaaaatatttaaattaagtatttatttaataaaaaataagtaaagaattgtttacttaaagatttgatttaataagaattttaattaaacatttaatttaatattaataatatttgtagatttaatcaaattaataggtattgatgtaataaaaataacaagttaatatttaataattaaagaattaatttaattaaaataattatacgtataataaaaataatttttaaaaaattaaaaattaataattaaatatatgatgtagttaaaaatttaattaaagttgtgatttgataaatataaaaattaaaattgaataataataacaagttaagatttaataaataaagactatacgtataataaaaattttaaataaagatttgatttaataaaaataataattgaagttataataattaaagaattgattttataaataaaaaaattaaagatttaataataatattagttaaagatttaataagtaaagatttgttgtaatataaattatagcagttggtattggtggtgattgggatagatctctatctttcggattcatcgacggctctctgtttatgtcaatggacctatcgggctggatcgtaatgtaactactagattgtcccccatagtttaattctgcatacaactagataaatcttgggtttactccatccgatatgcaagcgtatgtaactatgctacatcatcatctacaatatccaccatctagctgtcaattgagagaccgattgtccgcgttgtaatctcaacttcttgtaattcatttttatcagatcgcagtggctacatcttggcggcatacgaaacattttactttctccttcaaaaaacttgaccgttagacccaacgtatatactcccattataatagacaatggttattaaaccatttctattagcactcattttgcgtaaattaaaaaaactaacaaaaaattgtgtttttgaatgaaaatttttaaagaaccaagaacttcagcagaataatgtgtctggtgatttcaagaggcaagtatatatagccaaatttatttacctaattcgctatatcatttagcaaatttacttacctaaatcgttgtaccatataccaaattaagtcacctaattcgctagcaatcatggaaaattatgtatccaatcacacattgtcatgtgtctgccctgctcaatccgacattgcccagtaagcacctatttcgctgatccttctactaaattatgcaacgaatggtccattgtcacgtggcaacaaagggacaccacatcaacaacctaattctcagggtgtgcttcaaattatggcatatggcatttggacaaatcttttcattggtgtgacagattgacaaattattttcaaaagtgtggccttttgacgagtgttcctcaagtaattatcgtaatgacttattgatgaaaacacaacacacaatatcttacaacgcacaatattacataaagaattgatggaatcacaaaacatcacattgatagaaaacatatagtattgtaacagagaaaaaataaatcagtgtagttgtgcaaacaacgagagaaccaatagagggaaaaaaacaaaaaagaaaccattagaatcgttggaaatagcagcagtgatttccaaccaccgtatgcggcggcgctttttttcctcatcattcatctcccttctctcttttcccagtttcgacgccgccaccatccccttcgttgacatcttcactgtctctgcagaggatagggtcgaaaagaggagcgaatctcaaatctgggtagaacggatctcagatctaaaaaaagtgagagagaaatgaaccgatgcggcagttggattgacgaacgttttccgtttattggagatcggaaatcaacggcggtgcaaggaggttggatgtggtggtggttggagttgcggcgccctcatcgtgacggtatagtaaccgtgaatctgcgccaccatagctacaccctgaatgacgtggaagagaaagaggaagggaaacagaaacaaaggatacatgggtcaaagttttacttagagcaactttaatgcttggatcttaaattgggatcttgattactttttggtggatccatactgtcatataggactgaagatctcttaggatctgtaacattttttttttctttagtggtagatcccaaattgagattctagataactttaaatggatcccacacggatctcacttttaaatgttgtaattttgattaaattaaatttaattaattaagtaataaattttaattaataatgcatagaaaaaaatatattaacattaagaaatgacaaaatttaaataatttttatttataactaaatgttaaataagtgaaaaatacatgaaattgatgataaaaaaatgcaacacattaattttaaagaaaaatcaattttcatcatttttgtgaccgaaatgttcccaaatatgctctaccaagtctgcttgaagttgttgatgaattcctcttctatgcataacgtcttgtttgcaagtatgtaacaaagtcaggaggagcaccacgagatacttcaacatttgaaatgtcattatgtacgtggtcataatcaacatcgacattaccatcaaatgtatctcgttcgtcttcgacaatcatgttatgcaatataatccatgccaacattatatccttcattgtatccatgttccaggaacgcgatggaccgcatataattgcgaatcgagatttgagcacaccaaatgctcgttcaacatcctttctcaccgcttcttgacattttgaaaataatttccttttcggaccttgtggcattggtatggtcttcacaaatgttgcccaattaggataaatatcatctgcaagatagtaccccatattgtatggagttccattaattgaaaattgtaccgggggagctcgaccttgcaaaacctcatcaaacacaggtgattgatttaacacattaatgtcattgtttgaacccgcaactccaaaaaatgcatgccaaatccacaagtcttgtgaagcaactgcttcaagtattattgtgggtttgcgatgatcacctctacgaaattgaccctgccatgcaactggacaatttttccactcccaatgcatgcaatcaatagaacctaacatacctggaaaccctcgtgcagctccaatttggagaaggcgatttatgtcattgttgttgggccttctcatgtactcttctccaaatatctcaatgacaccccttacaaatttttgtaagcattgagttgcggtgcattcgccaattctaatgtactcatcaacacaatcagcaggtgatccgtatgccaatatacggatagctgcagtacacttctgcaacggcgagagacccattctaccaacaacatcaggtctcaattggaaatactcatcatggttactaagagcattcacaattcggttgaacaattgtcgccgcattcggaacctacgtcggaattaagtctctgtgtaaaccgaattttctgagaagtagtcattcatcaatcgtagatgtccatcttcacgattgcgattaatgactcttctaggccttcgacgttgattgctgttgcctccttgatgttgcatctcacgtagatagctcaatatttgttcatcactatcgtcgtaaagtgtttgataaacaatttctttccaaactctatcgaactcattatttcgatccattgtatgaatgattgtaggacatgtgcaacaatgaatgagaattaaacaaatatatagcaaatcaaaatggctagtataacggctagtttcgtaacggctagtttcgtaacggctagtttcgtaacggctagtttcgtaacggctagtttcataacggctagtttcgtaacggctagtttcgtaacggctagctttgtaacggctagttttataatggctactttattacttaaatcaaattaaaaggcaattacaacaaactaaaagacaataacaacaaaataaaatacaagtactttaatactgtattcctagtttacgcctaattatcttacaaaatgcttgatggtcttggagttgagtttcagacattgtagatgtgtctttcatgagaatgtcgtaatactctttttccagttctttctctcgtaaggctgctagtttggtgttcacaatatttctttctttcattgcttcctctacaccagtcaagtccacaacattggtagatgttcctactcctttctctttgctcttccttttggctgccttttgccccagtggacgggcaattcgagacggtgtgtcggcttcgacatcttccacttgtgtttctgcattagatgacgatgaatatgccccagatgtagaaatcttcgttctcttagagtaattttcaggaaattggtctaaccatttcggttgatcttttagaagtcgccaagcatgttccaaaccaaaatcgcatccttcgtcttccttccatatggcatatgcatcaagcatgactttgttctccgtgcaaccacttttcttcaatgatatggcttgcttgtaatgacctttgaatttttgcacgcctagattaattttttgccatcgtgattttcagttgattcaatgccctttcacggagttcacccctaaaattgttgtaattttccgtgactctcaaccaaaacgcttcttttccttgaccaacaccaacaactgaatcgtttgagatgttgagccatgaactaatgaggcacgtatcttcttcaattgtgaaggcgactcgagccttcttttttgtagaagatcctcctacttcctcaacgatgacatcttctagcccaatttgggtagaaaactgtggaaattgtgaaccaacttcatgattttcaaccatggtaggattttttggaggcatcgaaggaaatgtttgagaactttgagaattttcggtggaaagaggcatgcgataattttgcaaaaaattcatataactttgtcaatcaaattgatttggatccatttcacacaagtaaagtttaactacaagattggagaaaaaagattgacaaatgaaaatgaaagtagaatgcgccaatggttagttgtgaaccaatttataacaaaaaattttcagaaaaaatggctagtttaacggctagtttataaattttaatttttttgttttttttcccatctcctcacccccttctctccccttcacaccccctttttcttttactttttcttacctccaacggtcacctcttccttctcttttttttttcctctccccctcctaaaatcaacggtcatctactctctttttttattttttttctctccccccactctctggaatcttcccgtccgttaccccccccccnnnnnnnnnnnnnnnnnnnnnnnnnnnnnnnnnnnnnnnnnnnnnnnnnnnnnnnnnnnnnnnnnnnnnnnnnnnnnnnnnnnnnnnnnnnnnnnnnnnnnnnnnnnnnnnnnnnnnnnnnnnnnnnnnnnnnnnnnnnnnnnnnnnnnnnnnnnnnnnnnnnnnnnnnnnnnnnnnnnnnnnnnnnnnnnnnnnnnnnnnnnnnnnnnnnnnnnnnnnnnnnnnnnnnnnnnnnnnnnnnnnnnnnnnnnnnnnnnnnnnnnnnnnnnnnnnnnnnnnnnnnnnnnnnnnnnnnnnnnnnnnnnnnnnnnnnnnnnnnnnnnnnnnnnnnnnnnnnnnnnnnnnnnnnnnnnnnnnnnnnnnnnnnnnnnnnnnnnnnnnnnnnnnnnnnnnnnnnnnnnnnnnnnnnnnnnnnnnnnnnnnnnnnnnnnnnnnnnnnnnnnnnnnnnnnnnnnnnnnnnnnnnnnnnnnnnnnnnnnnnnnnnnnnnnnnnnnnnnnnnnnnnnnnnnnnnnnnnnnnnnnnnnnnnnnnnnnnnnnnnnnnnnnnnnnntcccccctgttttctattttattcccttttcttcctccccttccccgttcacccctccccctccctcattttttttaatttttttccctttctttctcccatttcccattcctctgttttttctccttccctcacggtcatcccctcccccaccgtgtgctttccatcggtactccgtcaccactccgcctccgcttccccctcaagtatggtttcttgttgtttttccgttttcttccccgctcatttctgttacaacattaagtattnnnnnnnnnntttgaaaatggtgcggatcttgggagttcttgtggaagaactagatctccacgtggagatctagttcttccacaagaagaagaagaaagaaaaataaataaaaagtgtggggaggggtgagggggaacgtgagagagggaagggaaggggacgggtttgtgggtgggggttggggggggcaacatgagtgagtggggaaaggtgagggaaaaagaaaaaagtgagggggggggtaatggacggggagattccagagagtggggggagagaaaaaaaaataaaaaaagagagtagatgaccgttgattttaggagggggagaggaaaaaaaaagagagaaagaagaggtgaccgttggaggtaagaaaaagtaaaagaaaagggggtgtgaaggggagagaaggggggtgaggagatggaaaaaaaaacaaaaaattaaaatttataaactagccgttaaactagccattttttctgaaatttttttgttataaattggttcacaactaaccattgatgcatactactttcattttcatttttcaatcttttttctccaatcttgtagttaaactttacttgtgtgaaatggatccaaatcaatttgattggcagagttatatgaattttttgcaaaattatcgcatgcctccttcaacccaaaattcagaaaatcaccccccccttttcccccctccatttttaccaccactaccaccaaattattttatgccaagcactcaaattccgtccactgaaaattctcaaagttctcaaacatttccttcgatgcctccaaacaatcctaccatggttgaaaatcatgaagttggttcacaatttccacagttttctacccaaattgggctaaaagatgtcatcgttgaggaagtaggaggatcttctacaaaaaagaaggctcgagtcgccttcacaattgaagaagatacgtgcctcattagttcatggctcaacatctcaaacgattcagttgttggtgttggtcaaggaaaagaagcgttttggttgagagtcacggaaaattacaacaattttaggggtgaactccacgaaagggcattgaatcaactgaaatcacgatgacaaaaaattaatctaagcgtgcaaaaattcaaaggtcattacaagcaagcgatatcattgaagaaaagtggttgcacggagaacaatgtcatgcttgatgcatatgccatatggaaggaagacgaaggatgcgattttggtttggaacatgcttggcgacttctaaaagatcaaccgaaatggttagaccaatttcctgaaaattactctaagagaacgaagatttctacatctggggcatattcatcgtcatctaatgcagaaacacaagtggaagatgtcgaagccgacacaccgtctcgaattgcccgtccaatggggcaaaaggcagccaaaaggaagagcaaagggaaaggagtaggaacatctaccaatgttgtggacttgactggtgtagaggaagcaatgaaggaaagaaatattgtgaacaccaaactagcagccttacgagagaaagaactggaaaaagagtattacgacattctcatgaaagacacatctacaatgtctgaaactcaactccaagaccatcaagcattttgtaagataattaggcgtaaactaggaatatagtattaaagtacttgtattttattttgttgttattgtcttttagtttgttgtaattgtcttttaatttgatttaagtaataaagtagccattataaaactagccgttacaaagctaaccgttacgaaactagtcgttacgaaactagctgttacgaaactagccgttacgaaactagccgttacgaaactagccgttacgaaactagccgttacgaaactagccgttataaaactagccgttatactagccattttgatttgctatatatttgttcaattctcattcattgttgcacatgtcctacaatcattcatacaatggatcgaaataatgagttcgatagagtttggaaagaaactgtttatcaaacactttacgacaatagtgatgaacaaatattgagctatctacgtgagatgcaacatcaaggaggcaacaacaatcaacgtcgaaggtctagaagagtcattaatcgcaatcgtgaagatggacatctgcgattgatgaatgactacttctcagaaaattcggtttacacagagactcaattccgacgtaggttccgaatgcggagacaattgttcaaccgaattgtgaatgctcttagtaaccacgatgagtatttccaattgagacctgatgctgttggtagaatgggtctctcgtcgttgcagaagtgtactgcaactatccgtatattggcatacggatcacctgctgattgtgctgatgagtacattagaattggcgaatgcaccgtagctcaatgcttacaaaaatttgtaaggggtgtcattgagatatttggagaagagtacatgagaaggcccaacaacaatgacataaatcgccttctccaaattggagctgcacgagggtttccaggtatgttaggttctattgattgcatgcattgggagtggaaaaattgtccagttgcatggcagggtcaatttcgtagaggtgatcatcgcaaacccacaataatacttgaagcagttgcttcacaagacttgtgaatttggcatgcattttttggagttgcgggttcaaacaatgacattaatgtgttaaatcaatcacctttgtttgatgaggttttgcaaggtcgagctcctccgatacaattttcaattaatggaactccatacaatatggggtactatcttgcagatggtatttatcctaattgggcaacatttgtgaagaccataccaatgccacaaggtccgaaaaggaaattattttcaaaatgtcaagaagcggtgagaaaggatgttgagcgagcatttggtgtgctcaaatctcgattcgcaattatatgcggtccatcgcgttcctggaacatggatacaatgaaggatataatgttggcatgcattatattgcataacatgattgtcgaagacgaacgagatacatttgatggtaatgtcgatgttgattatgatcacgtagataatgacatttcaaatgttgaagtatctcgtggtgctcctcctgactttgttacatacttgcaaacaagacgtgttatgcatacaagaggaattcatcaacaacttcaagcagacttgaaagagcatatttgggaacatttcggtcacaaaaatgataaaaattgatttttctttaaaattaatgtgttgcattttttatcatcaatttcatgtatttttcacttatttaacatttagttataaataaaaattatttaaattttgtcatttcttaatgttaatatatttttttctatgcattattaattaaaatttattacttaattaattaaatttaatttaatcaaaattacaatatttaaaagtggggtccatgtgagacccatttaaagttatctaggatctcaatttgggatctaccactaaagaaaaaaatgtcacagatcttaagagatcttcaatcctacgtggcagtgtgggtccaccaaaaagtaatcaagatcccaatttaagatccaagcattaaagttgctctaagatccagcactaaagttgttcttagacaaacaaatgtaacataggtttggattatccaaccctaattcccaactaaaatattataaatttgtgagaataaaaaactgacaataaatttggtatggactaaaaatgaatatttgtaggaaaaaaatgaattttaaccattaattaatcagataaataaacattatgatgtaattagttattatagaaatgttataataaagtgacaattcttaaagggtgcactggatgtcgagagctagccaatgatggagtgataacagttgcaatgttcataatgattgttaatgttaaagtttcttgttctctttgtgttttgaagtaatctagaatttaaatttgattttgtcttaaaaacatgttttatttgtaaaatctaattccattgtctgatttaatctttgtcaaaaattgttatatatctttcaatgttatttcagctaatatatagctttgtgttcaaaaaaggtttttaaaaaatttaaaatcataattcaatttcattgtgagatttatttttacatgtttcatgttggctttatgtaacaccccgtgtgcacccggcgtattaacattataaaatatcatagtcacgcagcatgcttggaaataaatagtaaaggaagcataattcactataatatacataaatacttttatatacatacatggtgaaattattgtcatatacaggccaacttctcaaaactatacaaatgacccctcagggtaccaaaatacaaccaaaataatcaaaaaagggagccaacaggctccagtcatctaggcctaatgtcttctaactatcccagtgcaggcctcttgccttggaatctctcagggacttcagactctgttcctgcaacataagccccaaaccggggtgagataactgtctcagtaaactcagggttctcagaggttaccctccccctggtttactttacaacccatatacacagatataacagatacatgaataacataacataatcaagcataatatctcaatctcaacataacatgatcaagaggcatccacagtgcctagcatgaattcatcatctctataatacatacaatcaaaactcaatctatctgtgcctgactaggctcatccacctactcgtgggtacctctaaccaggacttaacgtccaatacctgaataggctcatccacctactcgtgggtacctctaatcaggacttacaaggacgcctatggattgctctaagggagatcatccacctactcgtgggtacgttcccaaaaggggtccatagtttctcagtctactggccaacagattacaaacaataacagtacaatcaatacatgcatcatcattatcatcatcaatataacatacactatctcattgtaaccatacaagcacatacccttcatcagggcttgattaatgcacgtttgctagcaatatctagccatttcaatcatatccagtatcacaacaatcattagacatcgagcatatcattccacatcataaaaccacaaggcataagcatacagccataatcaataaacacccaaaatgggtggagcaaacacaagtaggagaaacaaactccaagaacactgagcttacctggtcgtagctcagaaacagctcccctagtatctggatgatctctagcaataatctgtgcttcacgccctacaataggcatgaatcaaatcatcagaaacggcattcgaccgtttatatggaaggaaacatccttccacatataatcaattcaaagtcatctagcttaaggttttatcttaatccagcttttactagatcatgcattgaccctcaatggtctgcatcagcctcttcaaggcctcagagttcctttagaactctgtataaatcaattccagactgttctaaagctaagaactcacattggctcaacttagccaaatcacataaataaccacatttcaccgattatttgaccttgtgatcaacttttgtaaaggtacttgagttaattcaggccataatgttgctcattcacacacccttttcctttcccagagcccaactcaaacttcatcacaatttcagtttcaacatgccatatgactcataacaacctcctgattacatctccctaaaggacctaagcctaattccagccctatcaatatttggttactnnnnnnnnnnnnnnnnnnnnnnnnnnnnnnnnnnnnnnnnnnnnnnnnnnnnnnnnnnnnnnnnnnnnnnnnnnnnnnnnnnnnnnnnnnnnnnnnnnnnnnnnnnnnnnnnnnnnnnnnnnnnnnnnnnnnnnnnnnnnnnnnnnnnnnnnnnnnnnnnnnnnnnnnnnnnnnnnnnnnnnnnnnnnnnnnnnnaattgcaactataaaaaactaaaatgtgttttttttttttaagaaaaacaaagacaattatttcaatgatagtgagaaaaggataattaaacttaagaatagaatgttccactgataaataattcaattctttaatttttaaatgttattcaaaactttaatatttattttaaatataaatacatttttttaactcaaatattcttttatgtgattttatgattaaggtaaaaatcgacatttatttatactaaatagtaatttcatctttgaatgttgtgtgcgtgtgttttaattatctagataagaaagacttcaattgttaattcataatctgatgaaaacaaattgatttttttaaaattgatcaaatattaagtttaatatatagtattcaaaattaaaaannnnnnnnnnagtggaggcttctctcaaaaactcactttcaaggctggattttggctcctaattgtttcaaattaagtttagaggtgattgggaggtgttttatggctttatagtgaagatatgaagcttataaggtgcttcaatggctgctgggacgagggaggaagatgaaaccatgatttgggaccaacatttcgtaaaatggctcttaaaaactggtcctgccgacgttcccgcgctaatcgcgccatatatggcgctattcgcgccaaattgacgcaacagaaggcttcctgggcatttatggcgctaaccgcgccatttggccgcgtctgtggcgctaatcgcgccaaactgacgctattagcgtcatcaggccgcaagaaatggccttctggtgcaatttcacgctactggcgccacttcctacgctaccggcaccgttcccacgctgttagcgccattcccacgctgttagcatggaattttttttttttttagatctaggttattatactttacaggattaataactaggtcatccacccatggcaattggagaatatgtgtccatgtccactaagtacgacataacgatagctaaaattaagggattataatgattgttgttgatgatgtgtctaccctaccaattttagtatttagtgtttttagtgctcattggattaaaatgaattggattagattttattacataatcatgaatcaaatgagttttttaaataaattaaaattaattaatgaattgtttttatccaatccattgtaatccgagtaaaaatttattcaaaatataatttttccacccctatgtattatatctatactttctaattctaaatcatcatgacaattcgcatcttctttttaaccattttccaaattttattgtttaaaattttaaatattcaacacaaggcgcgcttctgcactgtttcttgtttcagttttggttgcacacattctcaatgataaaactaattcttatatatgtgaacacacattctcaatgatgaaactaatttttatatctgcgaactaataaaccatagttgtgggtaggaacctcctatttctcattaacttggatggatccaaatataaacaggtgtataagaaggaagcaaatgtcctacttcctaaagtgaaacctagagatatttctataatcaattacacccaaaattagggatatacattccctaaaacaatttgtagctatcaattacaattatacaattgttgtatttacagatgaactcacattctcaatatgatgattggatgtgaattctctcaccggggatgttgtttctggcaatgtgttaaggaggggcaatgattgttatggtgttgagttgcggttgtaacctccctttataagccactcttgttatcctaatacaaggaggttgcatgttggggactacttggtgattcatgcttccaaggatttgaaggctggtgaggaggtcagttttgcttattttgaccgtttttgtggtttgagcaagaggaatgaaatggaggatgcgttgcaagtgcaatagggtgtaggttcaagggggaagtgttctccaaataggaattgagagagattaagattggtcttgagagggatgaatgtgtgtgtggggtgattggggggagtgtataagtttaaagagtagataaagaggttaaagtttatgggggagaaatggtatttgagggcatagttgggaatcatattatgaggcttataggtcaatgagggctattgaaaggtggcgaaagagattcctacgttggaggctgtggttgatagtgggagggaatcataggttgcttaagaatatggtggaggagttaaagaaaaatagtgatggagttattgaaaaagagaaacttttcaagatggcaagagaagtgttttggacggaaatggaaaagcaagcaaagttacttcttgaactctacattggtgattgggtggatcaagcctatggttttcgagtctacctatgcattagtctctttggtttctctagcctactagtgtatcagttcctctaatttcatcatcacataacaaagaatatggagattgaaagccaacataatgcatcttgcctagaaaccacaaacaatatagtgattgaaagacaacacgatgcgtggatgccctgcctattaattacaaaaaatatgaatattgaaagtcaacacaatttaaaattgaggacaatccaaatgaggaactaccttttcaaggcttgtttcaatgtaattatcttcttggcaaatctttcattttatcgtttaaactttgagttgattccattgaaacaagtctttaagaaggttgttcctatgatgtgctatagagttgacttttttaatctctatattatctatagtttgaaaggaaattagaaagattgtttcaggcaaaacttatttcaacgatattattaactcttgacaattctttcttttattctgtctctgaaactttgcatgaacaataggtgatagtagttaattcgtttgagaaataaataattaagattgagctttattaggcgattttaaacaactaggaaaagagttaaaaaaaattgcaactataaaaaactaaaatgtgttttttttttttaagannnnnnnnnnnnnnnnnnnnnnnnnnnnnnnnnnnnnnnnnnnnnnnnnnnnnnnnnnnnnnnnnnnnnnnnnnnnnnnnnnnnnnnnnnnnnnnnnnnnnnnnnnnnnnnnnnnnnnnnnnnnnnnnnnnnnnnnnnnnnnnnnnnnnnnnnnnnnnnnnnnnnnnnnnnnnnnnnnnnnnnnnnnnnnnnnnnnnnnnnnnnnnnnnnnnnnnnnnnnnnnnnnnnnnnnnnnnnnnnnnnnnnnnnnnnnnnnnnnnnnnnnnnnnnnnnnnnnnnnnnnnnnnnnnnnnnnnnnnnnnnnnnnnnnnnnnnnnnnnnnnnnnnnnnnnnnnnnnnnnnnnnnnnnnnnnnnnnnnnnnnnnnnnnnnnnnnnnnnnnnnnnnnnnnnnnnnnnnnnnnnnnnnnnnnnnnnnnnnnnnnnnnnnnnnnnnnnnnnnnnnnnnnnnnnnnnnnnnnnnnnnnnnnnnnnnnnnnnnnnnnnnnnnnnnnnnnnnnnnnnnnnnnnnnnnnnnnnnnnnnnnnnnnnnnnnnnnnnnnnnnnnnnnnnnnnnnnnnnnnnnnnnnnnnnnnnnnnnnnnnnnnnnnnnnnnnnnnnnnnnnnnnnnnnnnnnnnnnnnnnnnnnnnnnnnnnnnnnnnnnnnnnnnnnnnnnnnnnnnnnnnnnnnnnnnnnnnnnnnnnnnnnnnnnnnnnnnnnnnnnnnnnnnnnnnnnnnnnnnnnnnnnnnnnnnnnnnnnnnnnnnnnnnnnnnnnnnnnnnnnnnnnnnnnnnnnnnnnnnnnnnnnnnnnnnnnnnnnnnnnnnnnnnnnnnnnnnnnnnaaaattagtacgatttgtgggttttatcataaacgtaattggttattttcaattaagtaaatcaatagttaaaaccacactaaaaataaaacatttcacatttttataaaaacttatacccaaaaacaatgatattttcaattatagtctctgtgtgatgtaaaatatactttttctcatcatatatatgatttgaattaaattttataaatttacaacttgaattaaatttaagtttgtaaattgaatttgtataagcaacttaagtcttttttcattttttaccaaaaaaacgagttttcagccaaaattttaatgtgcaaccatatttttttagtataatcaaacatcgtgtgaaactaagtttgttttctaaaaatatacgtaatacttaaaagtattttttgaacggttgaccaaacaagtccttaatctacaaactcagtagcaatccaagtacaatttattagttgaatatcaataaaaagtctcgttcacaaaaaaaaagttcatttttgttcttaagaacaaatgtatagagaaagagccaaattgaactacacgtttgaacctacaacagagcacgtaattagaacactaagtaaactcttcttcctcctctatggttgatgtctttatcatatttcattctcagacacacatttgagaaggcaaggatcccctgcagctgcaggcccatttgcaacgctgcaccatcctcaacatttgtttctgttcgtcatgccccattattcaaccaaccttcagttttctcctcactcttgcatcaattctcgaacacccttatccatgtcaagtccatccacgcacagattatcaagaattgggtatccactgaaagctttctggccgcaaaactcatcagggtctacactgatttgggttttcttggccatgcccgcaaggtgtttgatcagtgttctctaccggaaaccgccgtttgcaatgccatgattgccgggttcttgaggaaccagcaacacatggaagttcccaggttgttcagaatgatggagtcttgtgatatagaaatcgatagttatacatgtatgtttgctctgaaggcctgcaccggcttgttggatgatgaggttggcatggaaattgttaggacagctgttagaaaggggtttcatttgcatccctatgtcggtagttcgatggttaattttttggtgaagtgcggttatcttgctgacgcgcaaaaagtctttgatcggatgccggaaaaggatgttgtatgctggaattcgatcattggcggttatgtccagaagggcctcttctgggaggcaattcaaatgttccttgagatgattggtggtgggttaaggccgagtccggtgacagtggtcagcttactcaaagcatgtggacagagtggacttaaaaaagttggaatgtgtgctcacagttgtgtccttgcgttaggcatgggcaatgatgtgtttgtgcttacttcgttggttgatatgtatagtaatttaggtgacactgacagtgctgctttggtttttgatagcatgtgcagtagaagtttgatttcatggaatgctatgatttcaggttatgttcaaaatggtaagatacctgaatcttttgcactctttcgtagactagtccaaagtggttctgtgtttgattctggaaccttggtgagccttattcgaggatgttctcaaacatctgacttggaaaatggaagaatcctccatgcttgtatcattagacaggaacttgaatcgcatctagttttgtccactgcaattgttgacatgtattctaaatgtggtgctataaagcaggcaactgttgtttttgtaagaatgggaaaaaaaaatgtaattacatggactgctatgctggttggtttgtcacaaaatggccaggcagaggatgccctcaaattattttgtcaaatgcaagaagaaaatgtggctgccaattctgttactcttgttagtcttgtgcactgttgtgcccacctaggatctctcacgaaaggaaggagtgtccatgctcatttgatccgacatggctatgcatttgatgcagttattacatcagcgttgattgatatgtatgccaagtgtggtaaaattcactctgctgagaagctattcaacaatggattccatttaaaagatgttatactctgtaactctatgattatgggttatggaatgcatggtcacgggcgttatgctctaggtgtctatggtagaatgatagaggaaaggctcaagccaaatcaaactacatttgtttctctgctaacagcttgcagtcactcaggccttgttgaagagggcaaggctttgttccacagcatggaaagggatcatcacattaggcctcagcacaaacactatgcttgtcttgtagatctttttagtcgagctggccgcctcaaggaagcggatgaattggtgaaacaaatgcccttccaacccagcacagatgtgcttgaagctttgctcagtggttgcagaacccataagaatactaacatggggatacaaatagcagatagattaatttccttggattacttgaactcaggaatttatgtcatgctatcaaatatatttgctgaagcaagaaaatgggaatcagtgaactacataagaggcctcatgaggatgcagggcatgaagaaaatacctggttatagtttgattgaagtagagaacaaggtatacacattttttgctagtgatgattcacatccttcttgggcggatatttatcaattattagaaaatttaaggcttgaggtggaggcagaaggttatattcctgatactagttgtgttcttcgtgatgtaaatgagccaatgaaggttaagttgctctggggacatagtgagagactagccattgcatttggtcttttaagcacaccttgtggaagcttgattaagatcactaaaaatcttcgggtgtgtgttgactgtcataatgttaccaaatacatatcaaaaatagttcagagggaaattattgtcagggatgctaatcgtttccatcactttgttaatgggaaatgctcatgtaatgatttctggtaataaggacttgctgacaactatgatgcacagataaaaatacatatccaatatggcaatagtattattctaaaaaggctaaaatattttttcgttcctataaatatcgaaaaattcagaattcatccatgcaaaaattttgtatgtttttcgtactcataaaattgaaatttgttattttttgatccgtagtcagacttggatgaattcaagcctacgtagcattttttaaaacttaaattataggctaaaatatattttttctccctataaatatcgaattgttcggaatctatttttacaaaagtttgagtctttttttgtcatctgaaaattgaaatctattactttttggcccaaacataggttctgatatccaaacctacatgtcactctctcattggtttcattgatagttatgagagtgggtgatttctggggggttataaactgtcacaaaatgtagaaaaagaaaaaaatccataactttataaatcccttattcttaacctttttctttcctaactttcttcatcttcttcgaatttaaataaataatttttttcttttttaaacgttctattcaactgcaatgaccaacaccatcttattaaccttgtcatcatcttcttcttctttgaatccgtcttccctaacatcttcacttccaaactcaacgtcgtgaataccaattccaatgttctatcggaatcaaatgtgacaaactcaacaacctgacttctgaattcacttctctcttggattagtatggtgaacgaagaatattaaaaaacaatgatttacaaaatgctttcaacaaaatatcataaaagtggtccaattcgattaaaaaaatgaactaaaaatatgttaaaatgtaaattaatttaatttcattaatcagtttcatgaaacgcagcatgttatatgaacaacttaaatatttattatcattccctttatcatataacctccatgatataaaaacaaaattttgtggattttgtggtttcattgatggtttcattaattagatttcaaacttttcaatatttataaaaataaaaaatatattttaaccttctaaaaatatatataagatatgatggtgaagtgaaagatatgagatacatatttacgtatatataaaaattcataaaaacataatacattaatttatctctttaattcaaattaagaacatactttttagacactataaaaaaattataaacattatcttataaatttcaggaataaaactatcaatttcatttctttcttaaaatcatatatataaagataacaatttctgtctttgattcattaatgaaaaatgctttcatttttctatatcatacatatttttatgtctaatgtaagtcgtattggatattcatatattttttataggctgttatatatactttaccaatacataccgagaaagtatcaatcggatacggatacgtgaagtaaagtgaaataccggtaattcattggctgaaaagctattgacaagtgacaaaagctaccttaatgaggaaattattgaacgtgactaatgtcaaatactcaaatggttggaacccatgtatctagtttgggaaattcatgacatgattgcaaaagagaaatactatagtttttttttcatagttaaactttaccaaccagtcaattgtgttagtgcgctgctgctcaaattcaattctttaaaaaatgtaattattgtggttggcaccactctaaaaattccataccgaaggtagttgtgtaaagtaacatgggagttggtgaactaaacaatcgtctcaataagtaaatcatggcaaaaacacacttcgagtatattagtacctcgtatgaaatttgttaaactcctaaagtctccactaattgaatactctaaaaaatttgatttagagtgtaccgacaaagaagtttgttcttgaaaaacatatgcttggtatgaacataggaaactaaggaaaacaaatgttggtacaattttttaaaaatataaactaaaagaaaaatgctagcttgcactttaaatgaattttgtgggatattagtacacttttttttacattagtataatttattaaccagataaaaagccgtgtgttgcattgcatgaatgaatgattatgttatattgttaagagattaatacaatatatatatatataatatcaaggcttaattccactttttacatctaattttttatttttgacgaattttattcccaatttttaagcatcttgcaaattttatcctatgtcgttttactattaacataattacatttttatctttaatttattgttttttttttcaaattttatccttaactttttaattttttggtgaattttactcttaaatttttatctttttggcaaattttgccctcaacttttttgcttattaatggatacatgatagagggtaaaattcacaagtttctttaaaattgagaataaaatgtgctaaattaaaaaaattgatggtaaaatttgttgaaaattaaaaagttggaataaaaattacaattaagcctaatatcaataatattatactaaatgttttagaataaattttgctgaagtgtttattttttannnnnnnnnnnnnnnnnnnnnnnnnnnnnnnnnnnnnnnnnnnnnnnnnnnnnnnnnnnnnnnnnnnnnnnnnnnnnnnnnnnnnnnnnnnnnnnnnnnnnnnnnnnnnnnnnnnnnnnnnnnnnnnnnnnnnnnnnnnnnnnnnnnnnnnnnnnnnnnnnnnnnnnnnnnnnnnnataataacatgatattatagtttaaaaataaaaatgttcctttttaataaatagaacccatgtttgtatttgttttgtgttaaaaaaattgtctttatttgtacatgtttgaatcctaatttatttttcttttgaatttgtttttcttctaactttgaattaagattggttcttttttataggatcttgagtcgtttgtttatttgaatgaattaacttaatttcaaattgcttggacaatcgaatgattttctataattgataatgttaattcttgtatatagctagtatgcatttgtcattgatctttgattgatactttttttttttttnnnnnnnnnncattatcatcgtcattggtgattgtacaaattgtaaatatttttggtttttttagtttgatatattaggaaatattttgtattttatatttgtttttaaagtttttttaatgaaaatttaaacatatcttgcatataagatttccattctcaatttaaatgtgtatgatactaagatagattaattcagctgattcaacatgttacatgagttgttataaactagacaagttatttatttctactgataaaaaaaaagtttggtataaatttattgagatattaagaaagttataaagattaattagatttataggttatggaagatgatacgtttatcaattaagattaatgaaagataaagtagacttatttgtcaaggtttattttaaacggtagaattaggggtgttcacgggtacgggttacccgtgaatccgaatcgatcagaatcgatctgaacagtttgggttgggtcatttatatatttgtgtcaaaatcgaaccgaaccgatcaaaatcgttcatgtatgggttgggtcacgggtttagatttacaggtccgttgatccgatgaatcgatccgtgaacccgtaataataatataaattttatttatatatatatattaaaaattaaaaaaataatttgacaataaaaaaaatgtaagatattataaatgtttaagattgcattcaaaaataagataggatatttttttatattgcattagaaaataggatagaatatttttaagattgcattgcataatataatagaatatctttaagattacattggataatatgatagaatatatttaggattacattcaaaaattggttaaaatcatatctttaaattagtataaatagaaatatattttggtgttcatgtatgcattccattccaaataatattagagtattagaaagtttatgtttgcatcattgagagaattgttgtgagatcatatagaagtgtttgacaagtttgattcttcaattgatttaaagatacctatttgcttaaggaatataagcgtaaatgtaactattttattgtattcttcttcttgactttgaaaaaggtcgcagttggaaactaggataccagttttgtctctgttcttaatgaattgagacatgcaacttctggctgggaaactaagataccagtctgattgggaaacaaggatatcagtctatctctattcttggtgaatttagattagagctttttgctgggaaacaaggataccaactgggataattgttctgtaagggtagactattatagtaaatattgttcacaaatcttttgttttaatttatattataagtctattttataatattatgttgatggtattaaatgaatcaatgttactactttcatacatttgataatattgtgttaattgtatgagatatttgaaagaatcgtgataaaagagtagttctaaaaaaaaaaaaaatgggtaacccggtgatccgaaccgaaccgaactgttcatgaacgggttgggttgggttgggtttcaattttttttttctgaaaatcgaaccgaaccgaaccgatcaaatttgattgggttgggtcctaaatttgaccaaaaccgatccgaaccgatccgcgaacacccctaggtagaatgatgataattaagctgaaattttgatgtggtaattggtgaaattgttttgttaaattttatttatatgaaaatgttaagcttcatgtaaattataaatggtttaaataatttttaggtctataatatatattcgatctttgttttaagttttttgataatttttttgttattatgagtcttcgatatattaaaatttttgtttttgatctttgtcataagtgattatgaggcatcatctcaatgatcaatatatattagaatagtcgttgaaatggtgtcaaattattacttaattaattgtaaggactcaaaacaaaacttttaatatatcataactcataataacaaaaaaaatttattaaaaactaaaaacaaaaatcggatatatattattgtcaatttcaaacatatttaaatcatataaatagatagattttttttttttacagaaaccaacttatataccatttcattcataatcaattgaacaatacacaagatggaatgtttgagaaaacatggagactaggaaagatggaaccgcttctgcaagtgcatgggtcctaacaaaacctaatactaaagcttggactactcataagtaaggaccttataaatagatagatagtcatatgatttcttcaacttataaagttttaaccgaatatttgattttaattgcagcaaactaacctttgggtttataattttgataaagtatagttcaactataaatgaaaaataataagtaaacctctatattagtttctgacattataagcattagttatagattttaatagttgattttgcaaaactcttacttagttcctaattaactttgcaaaggatcatttatttatcaaaacaaattggtacaaacaagagtaaaaatgcagttaaaaaaaatagatgaacaacatttttgtaaaataagacattaaaataaggatttagtaaaattatgaattcaaataactaacacttgctagattaaggagtacagtatactcaaaaagtaatgatataataaatgctattaatatactgtaatagtgggatatataaaattcagttattaaataactagtattaattgccctaaaaaataacaaaaattaaaatgatgtagaattacattatttaatagtaattttaatttcaatctatcataaaatattcagtgatgttattatcttcgcatcaattaaacaacaatacaataaccctaggaccaggcaacccaccacacaacttgatggggattcttagtacaattttgaagggcttctgtatgtttagatttgatcaacaagaccgtatcaccgttgtaccctacgacatacggaagatggtttcttaagtacaatgagcaattcaccattttcattattgaaaggacaaggtcttctaatttgatgagccgagtatatgcatggacttcaattttggcctttagtatgtgttcaaatcccaaatatttattctgtttatttatttattgcaagtatgcccacctttgttcactttgacgaaggtaaaacataaccaaaagagactccagttagtttaatgaaagttggaaataaattactatgccttgaaacttctattattttcttttaggtgaaatgggaatatattaaaacgtttcaattaaacttgaaccaatcttcaattatagtcctagaagaaaaaatccctagatgataaaattcaagtactagatccacatgtgcaaacaaactaaagtcagaacaaatctcttcttcacatgcaacaaattgccatgcctttgaaatttcactaatccttcaatccacgccgcgattatcgtttatcaagtctttgaagatatccaaaaaaaaacacaaagtccactttatgaaagagttttaattttggtctcgtgtgaagactaaagtagggttgttgacaaaaatgaacttatagcttatggcctttttaagagacaaatagagtcgttggttatattatattttatgtcctcttgaaagcgaaatgctacgtagtttaatgttttctgttttggcccattcgttaaaaaaaattgtcttttttttatatataatgcatgccttctttgttgaccaaggaccccaatttcaggaacaactataactataaaaccacgtctttatcttgaactctttcatttcaagtgtgtgagcattacccctttggttgtttgtgaggaataattaaaatttgtgtcattttatcacagtgacattgattttctatacctacagtgcctcaacctcaaaactataggccaaagagaaattttgttcaattggggtgctagctataatgggtaacacatttggtgctaagaaaaccacaaaggttatgaaaattgatggtgagacattcaaattgaagacaccagtgaaagttggggaagtgcttaaggatcaccctggtcttgttttgctagattctgaggcggttaaacactatggcgtgagagcaaagccattggaagcacacaaggatttgcagcctaagaggctttattttcttgtggagcttccgaaggagacgaggccgcgaagggttcgttccggcatcaacatgagtgccaaggatcgcctagagagccttgtgctcactagaaggtctgcctctgatctttcaatcatgaaacaaagcagcaacacggataataaggagaataatagtaatggtggtggtgtgaggttgaagatgaggcttccaaaagcagaagttgaaaagttgattcaaggttgcaaggatgaggctgaggctgctgagaggatcatgaagctttataaggccaatggaagcagagaaaatgagggtggaactaaggaaaatggtgaaaagatggtggtgttggaccaacaaagagttaaggagagtacaaaggtatgtgtttgttttcatggcatggttttgtggattgtttgatctttaaacatgagttttaatgttaactggttctttttctattaatgttaattattagaattctctttggatttatacaaaaacttactcttttaaaccagtttaaggaattcgttggaattttgatgacagagttatgttgcatttaacaaattgtgtcgaataaaagatgtgaaattttaaaaaaaattcatgacaatattcctcctattgttgaactttttttaagaaaaatttaacttttaatttagtttgatagatttcatagtgaagtagatttaagaagaggagacatttaacttaattatttttaccttgaatgtgagtgtatttgaagattcaaaggccagatatcaaccaccttacgttttcaaatttgtcattattttctcatcctaaaatatctgttaggaaaatgatattggaaatttccagaggtggtatatttgaacggaatacttcaaccatgttaaggttttattcaggaaaaaaataaacatgttaaggttttctttaagagttctaccaaaaaatttgcctttaaaaccttttttaattgagtttctccaaaataataaaaaaaattgataaacaaactaatatgaatggctgagaagggtctcaagaataaatggggccgaaagaatgcttaaacaataattaatgttgtctggcacaccccattttttaaattgtaggagttgaaaaatgtgataagagaaaactttaatatttgatagatgatgtgatataaaaagaaaataagatggaaaaaaagtgtacacacatgtataaatatcattcttacttattaatagtatgcaacaaccgaaatattttaatacattaacatactcttcatgtgaccccgtgagaaattaagttaccctgcaacctaataagagtattgagatctgaaaatattaaatgttctgttcatttcaatttgttggttctgcacaagatattgttgcacgaagtttgcataatgcatattgactttaaaaaaaaaaaatagagggactgagattattatattatttgagtatgaatattatgtgtgtccatatgactattttttacaatattgtatcaaaaaatcctgtttataaagactattttttttgcgttgaattcaaaattcttgcagaaaagggtgagttttatgccaatcaacgaaggaggaattgaagtagctgtggcttcataaccactttcattacattaaccatgaagccgaatattgaatccactgtgttgctgttagcttggggaatatgagtatttcacaaaccaaaggagctttgcttacacatagttgaataagagttatgctatttgaacaatgcttagaatttcaactggttacaattttataggtgtttgtatattagttttcatagaacagaagaatatatatttagtaagaactagtagttgctcttttttagcagacacctgttgtgactaattgtaaatctatgtattgtatatgtagcattactcctagagtgatgatgtgtacatattttgaggtatctattacctcctcatcatatacagaagatacattatgaatggatgacttgatattaattttctacttttctcttagagttctctcagttgtttatgattaccaaatagttttgaagctcgaattacaattagtagcaaaaatagaacaaggaaaaaatggtaaattactagtagatcattacttaaccataagttaacaagaaaacagttatgaatgattacataggtgaatgttcaatctactatgatagatgaacatactatacaagacaaattcggatgcagaggaggtgggtctcgagagtgtagatggagattttgattaaatttaatatagtttgaacaataaactttgtttaaattgtggaatcagtctacaagcataatcaagtgaacaaaattaatagattaaatttaaaatgttatttaacaaaaataagtatttttatcaactgcctattgcagctacccaactcaaaattctattaagttttttggtcaattagcttagctcttaaatatcatatgaattagttaggctgttaaaataatagtcgattcaatattctaagactatataaatagttgtttcgtacatatgaccaaatacaaacatttatttttctcttactcttctctaagattgtgtcttaacatggggtaagttttaaagcgacaatcttctccacttgctatttgtgtattttctcttctcatttgccttttcatctccttccatggtgcgtcctccgatgacaatttttaatctctgctttcttcacccatttgataaccccattggagagaactattaactcctagacaggtcaattcaatgaatctatttctcgtcctaataatgagtttgccatctttcttcttgtgtacaaaataacatcatcaattcttgattactcaatttagtttgtattgattgtgtaacaaaacttcacataattaaagagaatgtaaagaagaattgaatctttttagccaacttgcacctacatatatatggcagtgcacatggttgaacatgctcaacaagaatatgtacttgcctttataataagactcaatgaatgctatgctcaagttcatagacaaattattcttttggatcttatcctttccatttcgaaagttttcttcatttgttcaatatggtgaagcattgtgaacttggttattcacttttacaagtgcaagaattgcaacttgtttttgctgtgaaacacaccaatttaaagtcttctagcaattatccagcaaaaatgggaaaaaaaaaaagaaaaaaaaagatcatccctcaagcacccctaaagaggcttgcttgggcacattatatgaacgtgtgacctaatgatgtaatgcatttaatttatcacaagggcacattcatacatcatgctcaaaactgaatcctacaacaatttttgtttttattttgtagtttaaaagaattaatcgagtccaatggatatggagcgagtcacttaaatttggccaatttgctgaaataaccaagttagcccaaaaactaagttgtagacttgttggttcaacaaattaagtttgtgtttgcatgttacctcaacgctggtgaaataggtatccaaacacaacctaaatcattccaagtcatatagtagcgaagaaaagattaatattttaaaggtaaaagaaaaagaaaaaaaaagttaatgatatgaaaagaaatattttagttagttaatttagtttctaaaagcttttacctaaacaaattaaatgtcttaaatatttctgatgtctttcaattttttaagaacaaagaaacatactttttcttccttgtaatcgaactactgcatttttttgttatggatggagaaactttgtggtgaagggatcaatgttgtcacccaatccaaggccaagacaagtccttaagttaagcagtagtcataatagaatattcttgaattagaactcaagttatgtgtgtttgtcatggaaggaaaatgatttaagagagccaacttccttgactgcgttatagtttttgttacttttctttttgctgaatgtatagtttttctgttactgataaaaaaaaaagctattaatatggattaatgttgaaattgaaggttgactatgtatgcttacttaaaattattatatttgttcattatattattatttgtttaattttttttcatgttatgcttggttttcaagttgctcttgacattctttttaagaaattatagcatggtggttgattcattagctaagcctgctaaaaatattaaggttttttaaaatggcatgctaccataattttagtcataacatttaaaacataatgtttttaaatgacatgctatcaatgtgtagcataagaattatctttcgatatttcatacacatgccacaaggtggttggtagtttaacttaatatcaaatctcactttttcgtatgtaattattttatgtcttgctgaaaaattattttctggcaaaatgtgtgtttggattgttagtaagttgaagtcaccataatttttaaaagcaactaatgaaagttagttacttttatggtgatgaacttatcgtgattttacactcaccacaatattttaccaccaaatcaaacacagtataatactattcattttgtttctatttttgtcttaccaatatttcattttcttcatatccaaaaatataatccaaaatgtacgacttcaagtgcaagtcaatttagtaagctctctgaacgtggcctgcacatgtagaaaagaaaagtcgaagatttcttatcaagagaatttcatctcactttcctatccaagcatgtgcaaaaaagtgcacagccattgaattcttggaaactcaagcttccgtcagcagcaggaatattaaatcattcattcaaagaacaccatcttaggcccaatcaaaaggcacgctaataattagccattcacaaagctcaaaatgtatctctagtttattttaatttatttaaaaaaatattgtaactattattattgcgtttatttctttataggaattttttaaacatgataagtcttctaatgttatttccacctctaaacaggcacttaacgtaaatggtcaattatttcaaattatattttttaattgtggcaccatggtaatgcatttttattattaagtaaattttatgtgatttctgtaaaataaaaaacaaatccaaaataatttagtgagacccgtagaattcatagcttcattcaaaatgagatgaataaaaatgaagtatcagaagcaataaataaataaaatgtagtgccaaatatgaaaatttatttgagcagaaaccagcacgtccagtttttgaatagttttattcatattattgattaaaagtacattcatcattaatttacttttaagtacattataccttgattgattaaaatttaaaaatgaacgtattcacttggctttttaagtgcatgtttatgtttactttattgttacaaaaatacttttgaaacaaaataagatttacaaaagtattcagaccatttcttttgcaaaattaagtttgtagatcattaaattcatcttaaaaattttacaccgcattttgaacgaaaattcaaacataacaagtttttagtcaaacttctttaaaaacactctttcaacttcaaaaccagtttgttcaaaagttcaaacaaatgcataacccaagtttcctattctgcctcgtgtgttagctgttatatatacctgcgacaattaattagggttaaaatatagtttagcatgacgtggttcaattcagttcacaattattttaagaataatactaatagtaatgcctctccctctcatcagttttattgcttttagtagcctgttatattatacaccaatcccatgttcatgttctaatttacaaagttcatgttctaatttacaaagccagttcaatagccattttacctaatattttacattaaacgtgcattctaatttacaaagaaacgtgcaaaggttccaaagaatttaacataattccaacatgtaaccattttgatttggaggcaagctgatgaggcaaagaaaacaagttagcagtaattaatcattatgaacatatcaaaatattcatttctcaaattattgtaatattctcagttagaacaatagattgggaaagcaaagaaaacaaagtacagcaaggtgtatccaaaacaacaacttagtatcgaatatggatacatggctaacatgtacatttgaccactgcctctgcccttgttgtgtgttgtttggaaaagaatatatgattatacatttttcaggatgaccattgatcaggtaaggtgagaaagtatgtagtcatggccttcctgaatcttttcttgtattgtttaggagaaactattgtgggagcagcattttttggacccccaagtatccctgttgccttcacccatgtctccaaatgcttgtcccatgtgtattgtctcatgaaatcaatgatccccaaaaccagttctttgcgatcatcgtccaccccaaccagcaaagaatagtccataacatcaacagactgaagaaccaaaaatgtagaacgtaagtaacaagtaacaaccttgcaatagaggcaattgctacacttataagaggtaagaccaagaaatggctagttaaaacatttgtcataaagtgaaatcattgtttgcatgcatggttcaagggaaatttgtcaagagatcattttaaagaagccacatgattaacataacaaacaagcctccagagataccatggacacttaggcataacttatggatacagctaagtgctaagcaaattataattctgtataacttaatttaaaaatgctagatgtaacctttagccatttaaggttgtttggaagccgaaacaaagcttaccgccaaaaaggatgtgtcattccatacagctctttccagtcttctcttggccctactcccaagaaatatgggttttgttctcaatgtttctaacaaattcatgtctagcatcactttgtttgtcccggttgtgtctggattatacctagatctttctgagcccttgagatcatataccctggatatgtttctcttgtaaaagagattctccattaccatcagatctatttttgtttccttgccaccttttgggtatttgacagtgacctgccaccaaaacaagaaacattgtaaacataaaatttacatttatacaccggtgtggcatctgtatacaaaatgtcaaataatgagttagagttctcagttctcacctgataaataccaagaattttggcaagacaagttggccctcctgagttgagggcatccatcaggtatttgaaatactgaggtgcaaattcttcaaaggactcaaattctgtctttgtcacttgtttaataataaacctctcgtccaatgatttagcgaaatatacgttacttttccctccttgtgcactccatctccggcaacggctcatggatcgcacaaaatcaacctcattggggcagcatttttttctaagtgattcaaactgctgtgcaaaatagcaagtgacagaaaaattcactttacctccagctcccacagaatcatcgccaaaggaaatttgcaagtgtaaaggttttttggagtccctgagaactgaaccaacagaagatggaacatcttcagacccataactaccataattgatataagccaagtccagactaccccatgcagaaaagccggaagtagctaactcttctttgtttctctcacgcgcaatcctacactcttgcatatctgatttaccagacacccaatcttcatattccttggaactaagagcataggatattatgctagagtaatcattgtcatagacagcaatgactctatcaccatgatttgtttgggaaagtagcaatcgagcaccttcagctatgcctgacacagaggaaatgaatgatggtgtggagctcagaatcagatttagtttctgagtctcccatggcaacatttgaaagtaagactgcaatatgttagagagggggtctctaaccatattcccgtaatctccagaagcatgaaaagatctaagtgtcgataaatgtaaagatgagggcaagatttttctgattctttcctgaattcttactgctgaatcaaaagaatgaaccctcattggttgtgacacccttctaaaaggaggactatcatgttgatttgaccgttgaatacttccagctgggacggcattaggttgaggttgatcagttccagtccatgcagaatctattctctgagaaagattggactcatttgatgggaaacactcggataatgttctgttaggttcaccatctgaatatactttctctacctcaagattacatgtaaacgatcctgaagcacaaggttcaagtgcgtcatctggctctgcaagcataggactctcatgagactcgtgcaattttgaaagacgagtattattttgctcaagtccacaatcaaagttctgatccttgtgaagtgactcaactcttaactctttaacatctgcgcataattcattttcttgtttaaccttggagctaaaacttcttttaatgagagagtctaatgagtatagtcggtgatcccaaacatgtgaaccaataagaagagaacgcctcaagcgatttagttccagaatgtctaatgtcatcttccctggttgtgtggccactgagcctgactgtagcaaacactacatacacatgcatgagaaaagaaaggggcggcgggggggggggacaggaaattagatacaagtattaaagtatatttcatcagtacaatctatgaatgaacacacataaaaacacttgaacctgacaaggttctacaaaaccaagtaccaaaaggcaacactagcttgcttacatgataatcagttctttctctttgaagcatatctttcagatccagtatgtggttttgaatgtcacatgtatccgacgactcatttccaataccaggagacacaatctttgtttccaaccgttcaagcacgttagatatctccacatacaaggtttccactataataaaaagctgcgcaaaagaataaggaaagtgaagttaactttttataccaaggagcagataaactaaaatttacaattacttgagtatatatatatatatatattgttcaggactacatttaaaatatattgtagcttttttatatcacctctcctgcctcctttataatccactcctcttggatgtgaccaaattccaacacagatggaggtagatggacagaaagaatatcaataggggaataccggaagaaagcaaccatgctcccaaacctgttacacataggttgtttgttacctttcaagtattgataaccaacacaaattacataacaaaaaattgattggcgattccttgtctggatgatttacccataaaaacggaggcaatccctctgcaaagaatgtccacaggttgcaactcgatttgcagttgcatggtttgaaaagctaagttccaagaactttccaaaagataatccccaagcagcatccgacataacaactctccgagatgctggtggaactccatcctcaaatggacacctcagacaccggtgccacatccaaatcttgccatctctttcccctggtaacttcacagagggaaggcgccgaacattgattgtaagatttccttgctggtgagtaaaacataggacgtgagcctctgctggctctttacaagactggcagcaacatgcctggaaaagcaattcatgtcctttcacttcagaattaattactaccagaaaacacaaaaataaacacaacttacctgatcaaacagatcatcacgaagatatctcccaagaggcttatcaaaagagccataaaatttaaagcgcagcaacctagtacgttcacataaagttccttttgatacacaatgactggaaaagtataccaatatgctctgatgaccatcagtggcagaaaagaattcaccagaaagctcatcctcattaggcttgtcttttgagtcagaaacttcaccacactccctctcctcttgaaccatggtttgttgcaattctgattgcaaaaggtctcttgtattaaatatagtgtctccgtctgattcattgcactgatgtaaataatctgattctacagtcaaattagaagttaaattcttatagaatgaatcagagagtacactctcagctctataatctgccatggtgcctgtatatgaatgacaactaaagtcatcatgatgctctggcactgatcccaaattttcaagctttaaatcaagcccagcaaagtctttcactctagaagcatcgtcaacctctgattggcacatggttgtagaaaaggagttaggtatcatagaaatatcagtgtcagaagttgcactctctggcatgtcagtagagttttttactatcattttaggtagggtagcaccctcatcagcaaggaatgaagtctcaagagataagtgataggctgcaaaaactgcatattgcacaacatgtttaattttctttagttcttcacggcatgtgcccttcagcaagacctatattgagaatcaaaatcagaaacagacacaattgcacatccatatccataccttacacaaaaagaaacatgtaaaaaaaaacatggaagaaaataaaaagaaaaaggaataccgtgcaacccaatcgccgaggacaaccttcaaaaaacattagtgttttggttggctttttgttcaactgattagtagtctcatgatcttccaccattctgtctaaccggaacaactcacagtgccccaatcgtgctttagataaacgatccactgatggagtgacaagagcgccagtgcaccgagctatacgctccagcaaaggccttttaacattcaacaccaaggagatttcctttgccagcaaatattcctgggcacatgaagctacacttttttctaccagtaaaacatttggtcgaagagcctcaattttcgaaataatcatcttcagatgatcattttcctgccagcatttacaaatgagaatttctttccaagaaagaaaaaaaaaaaaaaaactgaaagacacacaaatcctatgagtcatgaaggcacctgctgtaacaatgtatcaaaagaagccaattggtttggaactttctgatattccagagctcctcctaaaaggagtagtctaggctttttgtattgagaggtcatgcgcttgtgcttaatattttttgtgcaaactactcctttgacaagggtgctgcaaaaccaaaaatcataatttaatggtaaatcacatagaagtgcctaggaacaaggcagggatttacaaggtatataggcaaatttcggaagacatgttacctctcacttgggcttccagatgctacacatttgacctttacataatcacccggatccatactgccacctttgctggtatctggtctcacaaagttagcagcctgccacgctaccattgcaactatgtcaagccagtcctcagaatcattttccttaccaactttaattccctctccctgtaaaagctgtgaaacaagagctctaaaatgcccttggatgacagattttaaaggtcccttgttttcatcattatgtttctcctttccaggaaacatattagatagactgcaactggatgagaacaaggcacctgagtcaccaatatcatcatcctcgtcatcatatgcaaagaaattaccttctgcatcatcgttctcatcatcaggcggtgggggaaaccaaatatgaccattgttttcaaaatccaatggcctctgcaaattctcattctggttccggaaaatagacaagtcgtcagaaaaataagcagtagtatatgcatcctcagtcccttgttcaggctttcttaaaacagccatactttgttgacccaagggaccatcaatctgagggatggggcctttctcctgccccttctgtacaggaagcccagccctgctagaagtaaaaccaatcctagaagggctatctgaaggactcgaccccacagaattatagttgtaagtgtcatgtctagcactaacgctacttgaatctatatctgaataagtatcacaatatgtacgtgatgatgggctgagaaggtgcttcctagattcctccgtcccctcttcgtcactcctacatttatacacaacacatatcaactacaaaggagttttgaggaagagggactacttgaattatgcaagtaattttcagttttcaaataattataaaggatcattttgttctcaaattcaaggataagaaaacatatatgtgagaacatatattcatcatcgattaaaataacaatgaaaattgaccctttcaattgtaatagtcatagaacatggaacaccattatgataagatatcagatatgcaacaactttctaatgaacttccaaaaaatacaaaccaaaaacatataacttcccgtaatgatgatgaaaatatgattacctgaaggtaggtggatgagtagataccgaagaagggtgagtacaagatgagttcacactcttgttgaccacagaacaaggataacatccataatcatgatcgtggaaacagcgatcgaagtgagttccctgatgcagttcagcattgagaggagaaccgagtctatcactctcaacactaaagcatggagaaggtggctcgggactttgtcttggactctcttgtggagagacagaagggtgcactttctcactgcacttcttctgaccctcaaaacacatcctcctactattggcatctgaacagaacttgcatgaacgaatggtttccttaattccagtgttatcagatacgcgattcgacatatcacaaccccagatgcatttcccacacaaccaacggccacagcttttgcaattgtaaatgtgctgctgattcatttcaccaagatttctattgcactcacaacacattttgcagccactatgatggagcatatcaaatttctcagacaaataacacaaatcacttcctccccaagaaacccaagaccttatcttttctattagatctaatagtgaactatcaggtattcccatataagatttaatgacccaacaaagaactcagccactgcctcaaaacaaaaacaaaaaaaaaaaaagaaactctacttacccctttttcagtataggaattttctttcacaaaatcaaaaaaagcaaaagcaaaatcctatctatgctttggcaccagaatacnnnnnnnnnngagacaataaagatctatttttgaatattttattttcaaattttaatatagtttcctattgaagacttttttagggatcatattgaagactcttttttacaaaaatattgaagacttaaagtattgatcaagtaaaaataattatatcaatttatatacatcaataataaatatagtatgatagtcaaaatatttaacttaattagttggttagacaaaattgtataagttattgtacatctcctaaacattgtcttcaatttttacatattaaaagaaatagtctcatttgcatttgagtattcctttctttgtttctttctcgaatttttgtcccttatatccagcaaaataaatataatgtgatataatnnnnnnnnnnttttctattagatctaatagtgaactatcaggtattcccatataagatttaatgacccaacaaagaactcagccactgcctcaaaacaaaaacaaaaaaaaaaaaagaaactctacttacccctttttcagtataggaattttctttcacaaaatcaaaaaaagcaaaagcaaaatcctatctatgctttggcaccagaatactgcactaaaattgtctaaaaataacaaatcaagtgaagagtattggtaaaaacccacgataaaattaggggggtgactgtgattgtttttttttaaaacaaaaaaaaaatcaaattaaatatagtttccttttttttcctcttttaattttgcaaatcctccagggaatcaaataatatcaaaggaggaggaggcgaccactataacgacgagaatctaggatttcaccaatcaaacaatatttacacctaaaaaagaaagaaaaatcctacccaaaaaataaccactgaacaacaacaatgtttcaaatatcacaaaccaagaacgaaatccctctctctctttctctcgctctccacaacgcccagcaacaaaaaagcacgaaactttgaaatgctaatgagacccccacaaaaactaaccgatccctaaatcacccagaatgcagtgaggaaccgattcgagcattaccacgaaaaaagaaacaagacccttaatagaaaacgagtttttctctctgttgagaacaaaaaggtgaagtctttgaaccaagaagaagaagaagaagaagaaggagaaaagagaaagtctgaacgaaggaagaaactttaaatgatgggaagaattagaatcaagaggagaaagagaagaagtacggagaaggttccctttctaccggaataggctcgcatctcaaacaacaacaacgccacttccttcttacccatctttcgctccttcactgctttcttttcttttcttttcttttcttttctcccttcgtcctctcttcccttaccaccttattgttattattttattaattttttaatcatataataaatgtagttttcctttgttggtttttcaaaaagagcacgcaatgccctcgctcctatttctttaataacaattaattaacaaatattaatatttatttttaaagtctggctaacggatgcccttaataagaacacttgataagaaattcaaaatattttttttattaaaattatatttttttgtctttatccttttattcattaaagaaaaagaaacacgtttaataaagaattgtttatatcaaaagatctaatttaaatagtatcatatcaattcaattttaacttaatacattaatcacttgtcaaataacttgatttattgaaattaatatttttttagaaagtggaaaatataaatgttaaaattccattaaaaacgttgattttggtgtgcttttactatattttaaaaacacaataaaactaatatttttaatgaaaaaatttactttaaatttcttcacaagtggtcttgtttttataaattatgataaatgcttttgctcaaaccaggtaagattgctatgagacaataaagatctatttttgaatatattattttnnnnnnnnnnnnnnnnnnnnnnnnnnnnnnnnnnnnnnnnnnnnnnnnnnnnnnnnnnnnnnnnnnnnnnnnnnnnnnnnnnnnnnnnnnnnnnnnnnnnnnnnnnnnnnnnnnnnnnnnnnnnnnnnnnnnnnnnnnnnnnnnnnnnnnnnnnnnnnnnnnnnnnnnnnnnnnnnnnnnnnnnnnnnnnnnnnnnnnnnnnnnnnnnnnnnnnnnnnnnnnnnnnnnnnnnnnnnnnnnnnnnnnnnnnnnnnnnnnnnnnnnnnnnnnnnnnnnnnnnnnnnnnnnnnnnnnnnnnnnnnnnnnnnnnnnnnnnnnnnnnnnnnnnnnnnnnnnnnnnnnnnnnnnnnnnnnnnnnnnnnnnnnnnnnnnnnnnnnnnnnnnnnnnnnnnnnnnnnnnnnnnnnnnnnnnnnnnnnnnnnnnnnnnnnnnnnnnnnnnnnnnnnnnnnnnnnnnnnnnnnnnnnnnnnnnnnnnnnnnnnnnnnnnnnnnnnnnnnnnnnnnnnnnngttaaaaattacttatattaaaagaaatgattctcttttattgaatgaaattatatgattaagtttctttaaaataaaaacatatatattaaaaagacatatcttaaaataaaataaaaaaaaaatctttgaatctgaatatcttaaaataaaactttaactttcagggaaaaaatgcatatgtcataaaaataagaaataaaaaaataagtgatgattcctttcagatgttaccaaagcctaaaatataacagtttggttaagttttttatttgtctctcgcttcctattggtcctatgtcagcatgcttattgcataagctggggtttaattagtataatatcattatcttcaatcgtactatccttaattaattaattggtttgttttttctctctgttttttaaactttgcttgctttgatccgcccccaatagaattgttaactgttcattggtcagcatcagtatgtagaccacaggttgaactcttttatcactttttatatttacaatgatagcaagacggaaaatataatacgaagggtatttttaaattagtggctgagatttttatagttcttttatataccatatgttaatctaatttgaaacaatatagaattttgttattttaaactagtgaaaaagacaggtacctatttgcattattattttttgtataatgtaaaaatacctatatgtggatattggaaaaaagtgaaacattaaatcgaaaattggaatcagtttcttatcaacaacaacaatcaattaagataattcggaagttaaagaagaagagagaatatgagaattgaaaagaaaaataaaagttataatgtaaagttaaagagtcaaataagtataaaaaatcaaaataggatattgcctttattatagaagattatagattataggcttgtggattatagatgataatgcttgattttaaaaaaatcttttggaaaaatattctttccatttttttatattttctattattatgtttttagagaaataaaacgatactctccactatatattacctctattttatttataagaaaagaattgtcgcaactccataaaatgtcataactcataagtcataacatttctttcttacagtaaacaaaccgtgacttaaaagtcatcacttaatagatattatcataaaaatcctaaaaatttatttgtctagagaacaaatattttttactcaaggtcatcatatttgagttggatataattactaacgtgatggtttggaggttggccacatatatgtgccgtcaacatagtcaattaggtcaaagcctactaggacagcattgaattggacttttctggtaggataatctgtgtcatttagtttggtaaaggaatgattatattagaactacaactaattaagagtcattaacttggatggatctaggtgaggaagacatgatttatagaatcaatatgattattgttaagctaaaacttatgataccatatagtagtataacgaggataaatgaatctaatttattcaatgaaggagcatactccacatatagatgtagattaaatgataattataacaattgaaattaagaaacaataaaattatctattgttaaactgacaataataattatctatttttaaactaacaataatgattatctattgttaacaatttatcactacataataatagaaagagatcattaacagactaaactaagtttatccaataatgatcggtaaaaacttttcttctaaatatttaacaaaagcactatgttgatgtcaaactagcaatatacattggtagtttcttgtaaccaaaaaaactagcactatacatttatttatttggatgactatcatttaaataatcattattaaattaaatgttataaatataatcaaaaaaagattttttgttttaattattgtgtaactatttaaagagtaaaatatgtttttaatctttcaactattcaagttattttagtctttcatctaaatgttgatcttagtctttgaattatgtttctatttcattttgtgtccctatcatttgagacctatgttaagtgataaattatctatcgaggtggcaaattgggagtaactatacggataatttattgacacgtgtaaaaatcagaatgccacatcacatcataaatagttaatttatttttaaaaatgatattcataaatatttttaattttttaaataaaatataatttacatagaaagtgtgctgtgtaagtttgaaaaggatcaaagtttggatccaaggtgctattgtttgagccctaacgcgaagtagaagtgggaggctacccatcgttgtgctcgtagttcgtcaagaatgacaattactcaaggagaatggttgtgatgagtggtgtaaagttgtcatctttaccatcggcatccatttagtctacaatttagctacacaattttttttaaaaaaaaaaagtcaatattagttattaatttatgttagtgggaataattcaaactcatgatctctttcttttctttttctttcttaacaaccaaatcaaccttataactattgatatatattgtgttaaaatgttaggttgactaggttttgctccacatatttcaagtcgtaattaagttggctttcaagtttttgagatgctctcaagtttgaaagtaaactttcataagagtgttttggtggacattaatgtgaatgagatgtggttggccggaggctcgcaaaaactctaaattgtaaggtgggacaattttcctttaaatacctaggattgtctattagggcaaacccaagaagaaaatttttgggactctattttttcgtgaattaatctcataattttttatcacgaggatacattaattttagaagaaaaagaaatgaaagggaattggaaatttaggatcaaggaatctatattgagtaagttagtagatattcttatacatgtgcagtaaaggaagactttgagcaaagtaagaaatgcaaatatctctattatttctgggcggcatattacctactattcagctaggccctgatctattgatcgttgtcaaaatgggtaaattagcacatttatttcgtattaagctactcgtgaaagtccaaactaaaatttaattacttaataattaataactttggcctctttagagaacttgttaattaaataatcacaagaaactcaaaatatatattgtgtttaaatttatttggcaacttacgtaaaatacaaaatcaacttgtaattctaatctcccactaatctttgtctgtgataatatattggaaaatcgaatagctagtacgtattacaatatatagctattttggtaatttaaaaaataaaaaaataaacattcctatcaagaatgtgcttactgcttagattagctctaagaccctaaagaattgatggagtggtgtaagcaacgacggattgagaaatcttataaagggaggcttgaaaaaaaatcacttataattgtctaaatgtctatctttcactaaataataattttaaaaaataatttttacacaaaattgaaattaatttttatattaacaacaaacactcaattagttttacataattttacactacttatcactttaaacattgtaataaaacaacaaatataactaattttacacaattttccacttattaatcttaatcattattataataacaacatatataattaattttatacgaattgaattaaaaatatatatttatgtacatgaaatgtttcaagggattttttttggggaggggagttctggcccctatctgttccgctatagatctatcttttgtgtaagatttcgttgtattcacatgtggaaatgatttatctagtggagaatcctgtttttcatttttatcatgtgcaaaatttgtttgggttagcagcaaccttacattgctagcgaaattagtctcatttttagtgagttggatgacactcatatgtctcttataattttaaaattttattgatttctctgcaactaatattttagtgtgtgaattgcaaaaaattcatagtttattttatataattaatattttagctttgcattaaacaaaataaatatttatttgtatataattatagttaaaattcatagttatacctataggggttgagtagggctgacaacccaatcgatcctagtcggatttctctctcaatccatgctcagggagcttagagcgaaatggaaagaggaaaccttgtttgacgaaggcctaaacacctcttcgatctaagttggaacccgttgtcgccccctggacctaacactttacaaaaagattattatgagtactaagcaaagattatgcaaatcaccaagtaagcatcattagcaaataataattatggaagattagcatgaccattagccatcgtaggtaaggccataggtcaaggcccattacaatatgcatataaaggatgagccttttgaggtaatatacaatattcattaacatttattactctaatttgttatattgggagagttcaaacttgaccgtccgagtatcttcaagtagtaaacccttggcacatttgaaaattattagggtcatgatttggtatatacatgtaaaagtaaaaatacaccaacaagcagtctaatttaattggttaataataatgtataaattattataaatttgttgataacttatcttggattcttacaaataagaataaaaattgtaaaagcaaaaataccatgaatagtttactttttagtaatgaaatttagatataggtaaagtattttcctcaacgaaatgacatgccccatgcaatacgaataggtaagaaaagggtttggtagcattagcttggaaagtgtttggtagccagacaacatctgcaaaagaggtgtgccgaaagatacaatgccctttctttcaaaaatttctttctcccattattaactacatgtactttgttggtcttttctttggtagaccataattctcctaaaatacactcattttcctcgcgtgagcaaatttggaattcccaatcacaatttttttaattaagtcttaatttccaaacgttaaaatttctttaatcccaacttggacgcataaatcttgttgtgctttatcttattagttacatcattgttacacacgaatagttacaaaaggacaagagagaagagggagagaaaccgcccttgaggctattaagcagacaaatctgcttcttctatatagatcatgattcatgagtcatatccatgtgggacggtgtcatactttgtgagttattttggttggtagagacgattcctcatcccacctttttttaattacgtgatgcttgtcaaattgagagggcaaaaagaggaaccccagttcttgaattatattttcatggagtaaatagttattcttagtatttttatttataaatcatatgtatcattcaagtatttaatgcagttataccttcaagacttaaattcaagattttgattaaattagaataattatatgtgagttgattcacacacttaatgataattatacttaatatttattttttatatagttattctaagtatttgaaacttcaccaaagtatttttcattttgcaatttaattcttaatttttttcttcattttatcacctaaatttattgaatttatattttattagaaattttaattttaatttaatcccaaaagaataaagatgatgtttcaataattataaggtctcatatcatttacgaattgaaactcaagtaaattataaatactctctcttcttaacctattgaaataccttttacaatgataaaattacgatgtcgattgatcattctgacaataccttatatacaagagactctatatttatagatttaaggtcaaaacactagcactagaaggaaggcctaaatcactcttgtctcttaacctcgataggtgaggttgttccaataattataaaatcctacctcacttagaagttnnnnnnnnnnnnnnnnnnnnnnnnnnnnnnatatatatatatatatatatatatatatagtgaaatgattatattcctgctaattggggtcaatgtttttataaatttaaagactcacttgtacacatatatgaaacataaaattaggaatcaaacttttaagttaattatttattcaatattttcatagtgaatttgtctattagcacttaagcagctttaactgttccttctacttgtgttgtactttagagctaatttaaaatgaaattaattcattgacgtggagtttggtaatttattaaatgggttatacctttaaaactcattactcccaatgtataaaaaaagtcaaaccgatgaggatataagatacaaatcaaatttatctaaaaagaaaacaacacaatcgaatgttacaatttattttcaagcttttaaccgatcgcagccctccattgacttttattttttcctaaaaaaaaccatgttcctcttcaaattctggttaaaaatcattttaaagattcacacatttttttaacatagactcgtattttaagttcacctttttttgacagaaagtttaagtctacccatggattaatattttagtccgtgcaatacacgtcgacaaatatttattttatataactaaaatttacatcaaataaatatttttgaatatataaattaaattataattaaaacttataataaataaataatttaaacatataaaatatattttaaatttataataataatttatattgtaattcatgattatatttatctattaataattttttaaagaaaatttaaaattaatttagaaataaaaattaaaaggatagattgaaagagaagaaaggttaagaaaagatccttaaaatcactctttgtcgaaggaaaaattcctaaattttttttggttgaattacttctaacaagactttcgctcgagataactattctaatttatatagagagaatataaaaaatttcataaaaaaaaaattagctctggtaaagtataaaataagggatacattttatagaaaaatgaaattaaaattgttagttatttatcaattattaagattgttacacacatatatatatatatatatgtgtgtatgtatgtatatgtaaacttttttttttcttttacaaaacgcacctgttactttagagcaatcaaatccaaaaaaattatccaaatttgaaatcaagttcacacccttttttatcatttagaattttcgatccttaacgttatcccattgcgaagtactttattaatatgaatcaggtataataggagtcaggcatgatgcttgctatcttgtcatcgtccacttcacgatcaacttagtccttaaacacaaagattaacattaggacctataagaagaagctagttagtatcttttggcaatactctgacaaaaacatagccaataagtcgcatcttgtgtgcatgtatgtctctttacattggtcggcttgaacgtattctcaataagttaaggacaaacaagcccacttaatcctcaattgtgttatgtcacactcaagttttctcactaatcggtaaatatctcaatcatacatggtgctaatgctaatgctaatacaaatacaatgttgatagattaggccttgcattgcctttatcgttgaaatttgaagattacagtgactagtgaaaaggaaatgaaaggagtgtgggactgggggaggatggtaaaggcttttaacagattaaaaatggttaaatgacctatttcattcttaaaagtagtagacattgtcatcttaatgtctctaattaaagaaattacaaaaagtatttgaaatcataatttgtgaatcactttagtttaattaactgctatatataacatgtcatttaagtgataatattatcatatgacaataaataattaagttttggattatcatgatatcagtgtaaaatattcattaatttgttgataattaatctctattgaaaaatatctaaataagtttaaaaacttaggtgaaccaattaagggcatgattgtttattcatttattttcctgtagtgcgtgttttgagacagatccaagatgaacggagaaacaagggaggaggtccattaaaaaatgcacgttcggtgctaacccaataaattctgaaacatgctctaacaatttcaaacatttatttacgtttttcttaattttagaaattcatgtgacgatatttatgacttcgagggaaaaaaggtgatttaccctaagaaaaattgatgcccttggatagatagattaatagttccttcactttatggtacaaagtttggtagctcctttgaagagccctgccttcatagttttactgcttcatagctgtttcaaccaccactctaaatggtagtttttattcctgggaaacacactggtggtgtggtattctaggccttatactcgtctttatttacaagcttctattctgttgtatccttctgactgtctggtgagagcattatttagattccaagtttccaccctcaaaactccaaacttacactctaggattctatatatgctagtgactttactcttttcattagcaggtgccccataccctactataaatgcatatatatgttcagaatccgtagttcttgttgggtgtgttaactttgtggagaatacagttatgatcctgttgccaagctttgtcctcatttatatggaggatatcaatgtagacaagaggtggttacattagattatagtgcccattttcatgtgtctccccggaaacactttatggaccaaccatatggccatatcccatttaattgaattcacttctatttagtcaaaataaatccaaaagtaaaaaatccaacatggtataatatgattgataaattaccttattttttaaatatatcattaactcgtgtgtattaaaaaatgtcaactctttaaaaaaatctcaatcttaaaaaattaattttttattttcagtcgatgaataacttgattaaaaaaattaaaaccaaaaaccctaaattaaaaaaaaaactcaagcaaatattgggtcattctggattgcataaaataaaatgcatgtgctttacccaccagtcatcaccaacagccatatacacactactcatccgttagattcttcattactaagtcatgaaaaatgaactttagcgttaaagggaggctgcgccacctagaaatagcactatttcagtggtgctagtttccatctttattctttgactaaagtgatcatgagcaaaattgagaaaattatggatgccactttaggtgaacttaactcggtaataagctttcaatacaatttattagtattgacttcaagatagtggaattctgtggctaaattggtaaatccaattaggcaagagattctctaatgttggcgtgtaaagctctaaaattgagttcagataactcttatccaattgggcgcacgccaccgttagatatttttctggttgaacttattagagtattcctgtcattaagaattaatttctcaaagatactcagatttattttaattcttaaaaatattgagatttatctaaactttttttttataatttagtcaatcaaatttataaactctctaaaagtcttaaaaaacacatttgaatccaacacatccatctgttgggaggcaaagactaattcatcaaaatacttatgtattgatattatttaaaggactaatctttcttaagagatattttcttatacatacaaatttgaaattgaactcgtaattatatggttgagaaacaaaataatctttcaattatatcatattattttgattaaaagtctatttgaaatattttgattcttcttgcatatatatttttctatacacacagaatcgaattttctgctgctggatataaaacaataatgttaatatgatcacttagatttcaaggttgcggcaaagactaaagaaggttaggaaaagcagagttatcccgcagacagcagaatttgaaggtgttgcggatagagccgtattggaaatgaaaatgaaaaagactgcgggtaaagcgcaagaaaagaatctatggttaggtagaacatcgttggacatttttttcttctcattttggtattaatatgaattagtttctattgaaggtgataattaatctttattaaaatggctgccgtcaaaggtccacaagcaccacaactcaatctattttgaacccatccttgcttaaatttctaaaaatgtcaagttaatagaatttagaaatgtataaaacaacccggttaaagtatctttgttaacttatttacattaactaagatacttcttaagctataaaatcactttcatgacatgatagaacagcctatattatatatctaccgtgcttagttgagtaattgcaaactagcttttcaatgaaaaaaaaaaaaacctcattggtacaagntaatttgtaataatgatattttttttaattcactttcaactcaccttttagaatttgaatcattttgaacttttctcatatagtagaatatgggataagtaaaacaacaaagagatttccattagtaggatacaagtaaattaaacatgtgagttatattaattatatttatgaattttcttacttataggatttaacatgatcatttttactcaatgtgaaatttctttacttatacttatcattacaataacctctatgtaaaataagtaaaaatttgtttttattagctcaaatcaatgggacacgttacttgacctcaacattgttaaaaaaaatgataagggatcctaatacataagtccacttccaaaaaaacttgtaatataattcnnnnnnnnnnnnnnnnnnnnnnnnnnnnnnnnnnnnnnnnnnnnnnnnnnnnnnnnnnnnnnnnnnnnnnnnnnnnnnnnnnnnnnnnnnnnnnnnnnnnnnnnnnnnnnnnnnnnnnnnnnnnnnnnnnnnnnnnnttcaaatcatatcatgacctttaaactattaggatttatcacctaatcaggtgtaatctgatcttaatatcaattgttacgagatattatgaataaaatattaaagggatttttaccaacaagtcataaatgaactacacaaataaattttatatcacatttaacccaaaattttaagacatttctcactcatattttacatagtaaattttagcccatatgaaactttccactcacgccacttcaacattttaaacctttctatctctttctaatttttctttttctttctctgtgtcaaaataaaattaaacccatgcaaaattatgtgtatcattgtctattgtaaaaccaaacatataacatgcatgaattgatgttaactaatgtttgaaaaagaccaattgtaggaaaaaagaaaggaaaacaacaaaaagaaaaaaaggtaggaaatacaacataaaaaagctatttctcatgacatcaaccaagagtagtggtatgaaacaacacgagcctccaaacccgatttgggacccaacttgaacaagaaatctgcatattgtatttagaatacattaatgatataaatatttttttcaccaaaaaatttaaatatttgtaaacataattcaatcatatatttttcataattaaaaacattaaattttacaataattattttaaaaatatatttatgaggatttctaattaattgataacgtgtcaaatttaattaaattcatttatattttataaattctaatacaccatccttttcaaactagagaaaaaaaatattataatatttttcgtgcataaatgattatattgctttttcaagctaagcaaaagaaaaggtatacattccattattgactaagaagacaattactttatatttgatggaaacaaaaaagaaaagttgtttgctatttaagttctagacctaatcgggctcgtccacttcttagccgcaccccatttgggtcaactcacggaaaatgcaaccgtgcaaacgcacgagggaccatgaaaataaatgaaaccattttccccctctctttattaatatttattatgaaaccatttgtataaacattattaaaatattattaccaaaaaaatttgttattaaaacattgcaaatataagcaatgagtttacctcggttgacaacacgctgactttatgagaaaagatttgagttcaatcttcatagaatatattcttgggagaagagagtgatgagttttaagtcaattcctttgattttttttaaaaaaagaatgtatccacccttaatttaaatttaagatttgtttttaactcaaatcaagaattaatattttttttttcattttacctaatttttcactttgaatcatatccttctttcccttgtactattgactattgtataaatgctctttaaggattttttttttgtgagttttgatttaaaatatgattgactccttattgtatgttaaagatcagagaaaataaaatatttctactggggttgtctctgtgacatggaatgaaaaactaaaaaccaagatcggattagttagaatttatttgttctgaagaagacaaaaaaaaaaaaaaaaaattnnnnnnnnnnnnnnnnnnnnnnnnnnnnnnnnnnnnnnnnnnnnnnnnnnnnnnnnnnnnnnnnnnnnnnnnnnnnnnnnnnnnnnnnnnnnnnnnnnnnnnnnnnnnnnnnnnnnnnnnnnnnnnnnnnnnnnnnnnnnnnnnnnnnnnnnnnnnnnnnnnnnnnnnnnnnnnnnnnnnnnnnnnnnnnnnnnnnnnnnnnnnnnnnnnnnnnnnnnnnnnnnnnnnnnnnnnnnnnnnnnnnnnnnnnnnnnnnnnnnnnnnnnnnnnnnnnnnnnnnnnnnnnnnnnnnnnnnnnnnnnnnnnnnnnnnnnnnnnnnnnnnnnnnnnnnnnnnnnnnnnnnnnnnnnnnnnnnnnaaaaaaaaaaaaaaattaacccaaaggaatcatgatgtccatttattggctagaaagaaagtcattggatcacgccattggtttttattactattaaatattaagtatacgaaaatgaaagtgtaacgtgattatttgggcccatgtataacagagcctactcttctatatccaccacccagccaactaatagtcaaattgcaagttgcaacatctatgtaatatatacaaaatttttatgaacaagtatgttctgttcgtgatgaacagaaatgtctagcagaaataattgaataatttatataggatcagattctctctctttgaaagtatttatggaagcaaaatgcctcagagatcataatactagagcaagaatacgacaattaacgtggggtgtgtgcactgtgtgaaaagatagagagagtaagcgctgtgtgtaccttgttctcgggaaacatttatatttataactactgacttgggagttagttggggagggtttttcccacgatcttgtccgagattcttggttagttggtgctcatgtattctgtttccaagcaaatcctgcatccattacttgggacggttatgactatgttctccttgttgatgtcgtctaacagagtgggttgactgagtcttaatggacctctcctggttggacccaattcgtaacaaagtatatgtaagtctttttattaacaacaacaaccataataacaaactttgttcgaagtttaatcatacttaaggattaaggctcatcacccctttttaagaatgtgttatgtggagatcgaatctaaattctctcccataaatttaatctgtgttatcaatcaaactacacttatttattatatacaaattttattaacatatgaaaaattttcgtagctatatattttatttgaagtgtactttgccacttcacgataaggtcatttacatgccactaaggttttgtttgggagagggattttggaggggaagggagggaagagaaaagtttatgtagagacatctccttgtttggaagttttaatttttgagggaaatgatttgaggattttcaaaaattcctctgaaatcctccaaagtcttaaaattgttgtcccccctatttggggggtttttagaaggaaaagtaactaaaattattattataccaatcagtgttaataaaattactattctaccctagtcagtatagaatatataatgtattaattttttaaataaggaaaaaattgtaaaaatttcttattaactctctatttctctcttttaatatatttttaactcccaaacaaggagaaaagaacttctcttattttccttcctttccatcccctcccttctccttaaatcttttttctttccctcccctcctaactctcaaacaaagtctaaagggacaacagtgccacaagctagatactatgaaatgctggttagtgagcactgagcaacagtgaaaactgagtgcaccatatccattgaaggataatcaaagctcgttcaatgcgacgtcaacttcaagattcaagacccatacttgcaattcaatatccactttgagtttgagggagagagatgctgagtgctgtcacacaatgaatcaagcaaaacgctgcagaaaaaacaaactaaaagagccactcaagtaaataataaattttcataaataatacatgcaagttgtgagtagtgtggtttgtaagttgttaagtaaatggattttaaaatcctcaagctaccactgacgtgagtgatcttgaacctgagtcttgaatatgtaagattacaaatcacttgtagtaaaatatatttatggtctcctaaaagaaaaaactccatgcccataatttcttttatgggtaaaagtcgtaaacaaatatctaaaaatttataacaattcatgcacatgtttaattaattgagataaatcccttaatattcaatgatgataaattctggttgcgtttagaagttctattatattatgacaattttaactataaaaggaagctacaaaataggtttcaatatatagtgtaaattacaataacacggttcagatgatagaaactttcaccaaaagaaaaaagacagaagattatatacattcttaagtgtagtttgaaagcaattattttttttataaaatatttatcttcaaaaaatcacttcaaaatagaaaaaaaatgtttttaaaaataaattaatgaaatacacacaaaatgctttttttttttatattaccgtcaaataatttaataaatatgtgaatcaattaggcttttggattcatcatttccaaattatcccatttcggcccaaatcataggaattattctactacccaacttgccaagcccaacatcattaggtgcactctccgcatggtcgcaaccggatgctttgaaactatttcagtgtggctaattacttaacacacctcattaattatttgttttggtgcatctcaagtacatcatagattggataatcaataatacaatttattacaaattattcaatttataatactttaagtaatttatgaaaaataagtctctaaataagctcatgtatttaataagtttattttaatcaaagaaacttataaactagtcaaataagtttataaatttctcaaaaagctaaaccaaaccaaagtgtttcgatattttttaaaatttgtaattttgatgttatatattaagatagagaccatttttttatatattttttttactttgatcattctaaaatattaaccggtataagattgatttgatgtgaaacaatctagtgacttgtgataggattttatttttattattcacgtcgtagaggaggacgtgaatctcttaaccgtgaacgatgcttttagtttgatgtatcgattataaaaatcagttaatttataatacattaagacttttgattagataattatgcaaagaatctttgcgtaaacttattttctccatagactaaaatgttcattggattacaatttttcttacaactaaaatagtgatttacgtggggaaggaagcaagaagtgtaagaacgacagcacagcaagcaatatgacgcgtgacgacattgaacctctctcacctcaaaatatctaatctcaaagtcactctcacaaccacatgttacatgttacatgttctatgaagtatctacgtcccacgcaacctttcgaacgcaaaaatatctattcttcacgaacattctaggcttcggaaccagcatgttccgtggtcacttttactcagatattttctccgcctcgtaaaactttctagagcattcatttccaaaaccgtccccaacaataataaatacccgataaacctttcaaacgttccctcgttcattgttcattgttcattgtgtcaagagcaaagagccaacagggtgcaattacatgagctgaaagaagataacccaaaaatccctttatttttatggttagaacttagaagctgatcatgacaatggaagctcgtggagaagggtcttctacttcttactacaacgttcttggtgttagttcagattctaacgtcaatgagataagacgtgcttataggaagctggctatgcaatggcatcctgataagtggacaaggtcgccttctttgctgggtgaagctaagcgcaaatttcagaaaattcaagaagcctattcaggtatgtatgcatgcttcaagttcttgtatttttttttttttattggtgagaatcgaagacacagattagaatataagaatgagttaattatatagatgattattatatccgttgtggaataagattgtctccgtaggaggagagccgtgggaagtaaaaaaaaaaaaggattttggtagatatatagatgattattaaagtcaatcaatttaatttacatgttaatttgtaatttgtaattacatatcagtgtaattttatttttttacactttgggtgtgtaaactatatatttcttttacacttttggtgtgtagactattttctcatctcttgtgatgttatattgagctcgggtgcttgattatgtatgttttcttgagcagtgttgtctgatagtaagaaaagaactatgtatgatgcgggcttgtatgatcctcaagaggaagaggatgaggtgagtgtgtttcagaggcatttttaaatgtggattcaaatttggttctttttaatttacttattgtttccttattgtgttatggtcttgaaagatttatgtgtgtttctctgcttccagggcttttctgattttgtggaagaaatgttgtcccatatggctcaagtgaggcgagaggtaatgcttcttataaaattgaatgaaaaattattttatgcttctaatatggttatggtaggaggaaaaaggttgacggttccaccctttgctaacaaaaaataacattatagcaaattaataaaacataccaacatttgtcgttaatttttttttcgttgtttatgacttggattttttaattaaggtttggggtttcattctggtttggacatgaaatcgcaattggagatattattttactccaaaatatgaagtcacaattggagatattactttactccaaaatatgaaatcacaattagagatattattccaatatgggttgattcatgggagattattagttgacttctaacgatacctttggttaaaaaaagatataaatacgattgagtaacaacactaaccgtttacaactatcaattgctgcagggaaagcattacggtttagaagagttgcagggtatgttaatggaaatggctaaaggattcgagtgtcctccaatgtactgtggggtgaactctgtgattgatgagtctccatgcttaaagagaacgcgttttgacacaaacatgatggagagtaaagggtcacattttcaagtacctgatcttaacctctattgcagttaacgtgttcatggatcgatatgaagaaaaaacagaggggtggtactggtagtgataatgaattttggtagttatttcaacattttgaccatgcatttatctgtacatattctttgtatggtgctaaattcccagggctttttcttagtttctctagttgtaaatgatatatggggtctgaaggggaagaagaggaggagaaaataatgattcagtagtttcgaaattatgtttgagtaaggattatctgccacggaattgtttactttttgtatttcttttatttggataaggataagaagttttatggacatgtttgagaaactaatgaatttttaatgattttttgaacttttatcactagatttttttaagtagtattatatataatactagatttttttaagtagtattgtatataataatttgtaattagattatagtatgcttttatttatttattttgttaatgattattaattgatttgattttcattaataaattcgatcctagaattgatatttataggttaacttaatatttagaattaaaaatagtctgattgatttaataatgtaacgggataatatttttttattaactatgaacgagaattgaatataaatttctatttatatatttcaattctattattaggtagattatagtggttaagagattacatntaattaatttgattttcattaataaatttgatcctagaattgatatttataggttaacttaatatttagaattaaaaataatctgattgatttaataatgtaacgggataatattttttttataactatgaacgagaattgaatataaatttctatttatatatttcaattctattattaggcagattatagtggttaagagattacataaatcgacttcaaatgttggcattgttattgatgttaagaaataaatttacctttaagaatattacagatttaattaacaaaaaatgctaatttttggaattaaagttattcataccttcactttacaattaagtccacaataaaggtgtttcaacctttatcgaaaggtatacatacataaaaaaatatgaaaaatatatattttattttcaaatgatgtcacattaaaaaattatatatccaccacaaagtcgaaaacatttatattccttgtctgatacattttcataatctacatacttttcagtatttgcaaaactaaaaacagaaaaagtactttgtcttatttatatgatataattttttattcttttatatgaattgaagacatattaataaatttataatattcgagttggactttttaatataactaattacaatctgggaacgagttagacttcttaatatannnnnnnnnnnnnnnnnnnnnnnnnnnnnnnnnnnnnnnnnnnnnnnnnnnnnnnnnnnnnnnnnnnnnnnnnnnnnnnnnnnnnnnnnnnnnnnnnnnnnnnnnnnnnnnnnnnnnnnnnnnnnnnnnnnnnnnnnnnnnnnnnnnnnnnnnnnnnnnnnnnnnnnnnnnnnnnnnnnnnnnnnnnnnnnnnnnnnnnnnnnnnnnnnnnnnnnnnnnnnnnnnnnnnnnnnnnnnnnnnnnnnnnnnnnnnnnnnnnnnnnnnnnnnnnnnnnnnnnnnnnnnnnnnnnnnnnnnnnnnnnnnnnnnnnnnnnnnnnnnnnnnnnnnnnnnnnnnnnnnnnnnnnnnnnnnnnnnnnnnnnnnnnnnnnnnnnnnnnnnnnnnnnnnnnnnnnnnnnnnnnnnnnnnnnnnntttcttattgaaaatattaaaacattaagtttttataccttgcgttttgtgtttgttttggtttcagcctaaccgttgatcttcttcagttgagaaggcttttgttatatctactttcattttttactatgttcacccccttgacatcataaatattttatatacccaatgcatccctatatcattattctaaatttcataatgatgtttaaagtactgaaagataaattttttaaaaaagtattgtttgaaatttaataaaagaaaaaatgtgcatctattaaaaattgaaaaaaaaaacaatcatcataataaaataacacacgaacatttaacctcttaaatctataatcaatttacataaatgtgtaaattatgtatggatttcaggcttgtaagaacttttttagtttgtgataatgatatcagataagtaaaataaaaaaggaaaggaagaatcaaataaaatattgagatggagtaacaaagagtgaaagagagaaaggaagaatcaaataaaatattgagctggagtgaaagagagaaatattttattgttacgaaaggagtgcaatgttgagggtggggtaatatggtcctatgaggaaaaggagagtttgaaataaatcttaacgatattcatcacaaaaattttaatcaatgttgcaaaaattagtcacggttgatattagtcgatattggccaaaaaatagcagtgattaacattgattaaagattttagccgacttcaaccaaaaattaattatatctaagatcgacaaaaaaatctttgactaatgtcgattgaaaatacactgattgatgtcagtttaaaaatagtcttgattggcgttggtctaaaaatatctgaattgatatctgtcgaaattatcctgattgaggtaggtcaaaaatatactaattaagatcggtaaaaaataattttgatcaaagttggttgaaatagttcttgatatttgaattgatatctgtcaaaattatcctgattgagataggttaaaaatacactaatcaagatcgttaaaaaatagttttgaccaaagttggttgaaatagttattgattgggtaggtactaagtttttactttttagcatttaattactcaaatttgttgaaaaaattttataatatttaaatggatataaattagatatgatcaaatccatatccacttaaatgaattgggtcttgaatctatttttttaaaaaaattatatgaatatagatttaaaatctaatccattgaagaagatatgtattaaatgtagattagatttataaaaattcaatccctgcttagtcctacgcatgatagatctgtgctgttagagggaggatgccatgactaaaatggttgctttgtgggggtgattggattctgctgagtaaagatttgaattgtagaataggttggtttataatgtaccaataggctcattctttgtcttcaaaaacctttgcatttcatgttgtccacatgaaccaacatgtgcaagcaaaaataactccttcgttgctggtgcaaaatgttcgtagtagatgttgtgtcagagctaggaatactaagatgagtgaactgaagttgctcccacactaagaggagagtcgcgaaggatatgcatgaggtctttttcctaataagaagattgtttaagtcactttagtttagaaagaaaaagtaaagtaaatatggtcctatcacatttccatccctctttgtgtaaaaacatgaaaaaacacattgaaaaagaaagttgtgacatctcaaaaatcaacaataccttaattttttttaatgttacagtctaaataatacttttaatttgtgataaaaacgcaccagttttataaaacttttatcattctcattaattattaaatgtgagcacatctttaatttttatatgcatttatatttttttgttatacatagctttatcatcacgatttattataaatatctaaaagaatcaaattattgtttatattgcttttagtttttgtgatgatttatgtctctttaaatctaaatattattttttcatctcaaattcatctacttgtagaacaacacaaatgtcaactatattatttttttaatctttcagtttatttcggagttcaatcaagaaataagtaaagtctgaccaataattatttttgctaagaatcaaactcataattaccatcagttttgaatcaatgttaaaacaagtgatgttgaaagcccgacatttctacatcagttttaaaaatcgatgtgaaaaatacctttccaccttggttgttctataaatcgatgggaagacgatacaaaatgtgaaaatctacctaatttctacatctagaatcgatgtagaatgtaactacataacatcaattctccttataattgatgtcgcttatatactttctacatctatccaaacgatttaaacttcatccattaatcatttgtgcacaaatttcaactatatatgtatacattcaaattattatttttgaaagttatttaaaaaattatttatttggaattcctaaatctttatatttttacttacatcatttatacataattttttatgttttcaattttgacttttaaattacaaaatatactaggctccatgcttgtattgaaaaattaacaagtttcatatttcttaacaccaaataaataaaaagttatattttttgtccataggaattgaatacaataataagaaatttataatatactcccacattatattcaaccaattgagttaaactcgttaatgataataaaaaagttgctatgggcactccatcgacatcacacaataccaaaaagttcaattacatttgtcaaagaagttgtggtggtagtactacaacttttatgtgggtattatttgtctttgattctaaaagcaatcagagttgattttcgaggtctcaataaaggctacttaggagaattctgaccggtggaggaatctgaccaacaaggatgttgagtgaagtgtcatccgtaatgtgagagttgctgagaaattgaaaatcaaggatgttacaaatggtatcaaaacaaacctctctcctagtatagtgtggttggacgaaacaggcgaaagctagtgggcatgcaacactccgatgaatcacaccagaaagagagaggtgcaagtatgagattatacaactgagggtgacttaaaagaattaattggtactaacaatactataataaccctgagtcctggcgtggacggcgcgagcaagcagcgcggatagcgctggttttctgcagaattcttctgcagaaaccagctgcagaagtgtggcgcggatggcgccagggtggcgcgatcagcgccatgcctttgatatgtggcgcgagtcgcgccataggttctgggggttgacgcctggggcgccaggtcagcgcgagtggcgcgggacaacccagaggacctgttcttctttgcagggggcgcgagtggcgccatggtggcgcggatggcgccattggttctggaggttggcgcggggggcgccacaggtactagagaatggcacggttggcgcgggagtggcgcggttggtgccgtgggctctggaagctggcgcgatcagcgcggcagcccaagctgacccactatatgagggggtcattttacgaaatttgacccaaatcacttcctttcttcttcctccagcgacccacctccatttttgtgtgcccaagcttccttgaccttggtttgttcaccaaatcaccttccttaaacctccattgtgttggaaaacacttggtgagcttgaatccttcatcatttctccttgaaaacccccaaatcaaagaatccatttctcaaggaaagttcatagaactcgagctcggagaggaacggcgacgattcatgaatacccaagcttggggaagtcgtccttgggccttccttgccatctttgaggtaagaaactcgagattcaccgcttgatttgtgagttggggttttggatgaatagtgacccacttgtgataaagctagtattagccttgggtcctttagaaaaatgtgtttagaatgttgtgaggatgaagaattagctctcatatgttagtttggtgaactttgagttatggctctatgatatgcatgtatagttgatatgctgagttgcttggatatgttgtgacatgcaagagtcttagtatatggtatggatgtgcctgagaggccatatgaacggtgtctcatgtgtgatatgaaccgttcaagccatatgtgaacccttgagccattgggctgttgagagctttgagctcattgtatttggcttgtgttgagtctgaggtgactctaatgccatggttgagattagatagaccgttgatggtctatgagatggcttgtgcgtgatgagcattgatgaatcttaagttagaggacttagaggttttagaaaggaatgaggtacctttcgttgagacggttgagaaccgtgctatatgcttatgcttgtttgattgcttgttgttgatatgagcttgtatgccttgtatagggcgtgacaccgagggtgtcagtggcgtgggccacagaacaagagaagaactgcagaactcggctttgccaagtaagttcttggtcccttggggatgtttcccacttgcttgtgctccaccatactcctagggagtgatggttgcattcatgatgcatgcattgatggttgttgcaacctcataatgatatgtatgcttgcatttatgcttgagaaatgtatgatacatgttgttagatcttctggccagttagatagatatggacctccctaggagatgggtttcctcctagtttggtttgctcatggttgatgagatcccaggggtcggtgacccctcaagaccaagagataggtgtgtctcgtcgcggttgattacctattctcggaggtactatatacgtgcgtccatgcgtaaggggtaactcccgatgggatggcacatgtgtgagtttcagtctcacactaaggttggcgttgatgagatccgccgtgcatagagcaagatgacttgcttgtattattatgagggccgggaggccagtttgtttgtgatacctggatgacgtgtgtcatggaaagtgagccagggtggagaaaatgcctccaacgaccctgagcttactgagatgtttatatcatcccgtgtggggcttatgtggtttcaggtgacgcttctggcagagagaagcggtctcagggcgggaggtcccagtagagacagcatatgcttggctgtgaggcagcttgaggagagcttggtggctcaacttctgatgatgttttgtacccctgtagagggaacatgtgtgtgtgtacacatatattttgttatgtatatgttgtgtatgccctcgtgtgaggaaggatctgtgagatcagaagcatttaaatgcttattcttttgtatagacacttcgagtgtcagatgatgtatatgtacataactagtttatgttatgtattgatgtttcctcctgtttatctgttgagataatttatgtatatctgcctatggtttttgtgaatctggatcagcaggagcttgtgttgctttgtgatgctttatattccatacataatgtaatcaacaaatatggttttcgatttatgcttaggcaaaagtttttaattaaagtgattaagcactaatatgataataatcataatatcaatacaccgagtgcacacggggtgttacaaatatcaacaagatgcatatacttttcggtggcccatcactaaagaacttcatagttaagtatgcttggcttgaaatagtaatgagatgagtgactttttgggaagttttctgaaaagcgtgtgagtaagacaaaacatgctaaaagttttgtgttgatttgtggggtcagtcagtgatcttagaaggaaacatagcttatttttgaggtcttggaaagaattacctacagagggttctaactggtggatgattctgaccaacaaggatattgaatgaagtgtcatcttgtgaagtgttatattgtgagagtcgttaagaagttgaaatcagagatattacatttcacacattaaagcaatataggaaaatatacataaataaaagtgatcagtcccatagtgatccctgaattaaacattgtaccattgcaccacataccacttggagctaaaaggttctaggaatatgtctcacaaaaatagggattgtgctttccaaatggtcatggggtggtacacacgataaattattagatgatcttgaattacataatttttattaatcttcaaacgacatatatttaagtgtttttttttaaattaaaaaacttaaatatgcattatataaaattaattaagataataaataaatatttttttattttattataattattgtataagagaaaaaattattctaaataataattattttaatttttgtcgtaatattttatattttatatttatagttcttataatattaatgataaaacaataaaatttataaataaattaataatgatataaaattaattttgtaaaattattattctcttatatatatatatataatttttttttcatatgctacaaaataactaagacgaaaattattttaagattggcagagtaaaattttgcagtacctgataatttgtcatcagacacctgtcctggataaaggaagggattaaacaaaggtcatataagagatgtatcaaatataaaattagagaaactcaataattagccagtgtagtgtgaagttgatgactcaacatcaaaggcacaattacaatagtccaaaatgatgactcaacaataaagctacaatagtccgaaatgatgacttactcagccctttgatttgggaggtgggttagaaaataggacatgagaagggataagtcctacacaaacaaggcatatgccaaaacgtgtttgttcaatataataatactaatatagtaattataattcgtcatacgcgtcaatttctttcgtagtagaatgaaatacagaaatacacttgtgaatgtgttagtgactagctaactactcaccccccgtcattatctccctttttatttttctccttatttatatatactgtggtgccaacttataacataaagtagaacttgattttaaatgctagaatagatatagaaaataaaatagtttgaaacaacagattaattataatactataacttttagaatcttaaggtcaaataataggctttttttttgttacaacgatcatgtggcaacctccagaaggtttcataatgtgaaataatataggttcacaaattaaaaactcatacaaaaagttgtttacaccaagaaaagaaatgacttacccctctttgcaagatatgatttccacacgcatacgcctaattttctggtgatgatgggcattgttactgctgcactttagctctaaaaacggtgctgtcaactttaagctgcattaatttcaacaaaagcataactaggaattggattatcgcatatatggactttccatgaacgaaatttgatttgacctcaaaaagtgttgcaacgggtggaatacagggatccaagattaatctcaaatcgtgccaaaacttagcaatccaaagtggtctagatccatggtaattttttaggacatgtagatatattatgcttagagaaattgtttttcacaacaaattaaaactatacaaaaatgattcaatctcgtgagagaaaaaaaaaaaaacagtgcaaaatatgatgaatataataatatcataaaaaagtaaaaaaagtcaattttacaagaaattaagaataaacagtacattcatcaacaatgtaaaagtcttttttactatgggttaaaacacaaatcataaacaaatcatacataataaattcataaatttttatgataattattttaaatatcatactaaaaatatttttattgattacgagttttttttttaaaaaaaaatcatcatacatattaaactcatatcgtattataaaaaagattaccaataaatcattaatccaaataataatgacttgattttttttaagtagacttatatactaacaactcacatttttacaaactcaaactttaataataacagtaatatataccaataataacaacaacaactttaaataataatattatgaattattaatttttaaaacattataatattatcttttgtatatttattaaatcaatctatctacctacctatctacttttctatgtaaatttcacttgaaatttttttaattgtaagatcaaaattttaacttcataataatggttgataaaatttaattatgtaattttttcttcaacaattttgaggcaatagattttttgactgtagatattccatactaataacaaactaaaatataatttaagtctcccaatctttttattttttaattaaaatattttgtctctcacttttaaaaatttacaattttaatcttctttatcaattttagacttcactatgtacttttttaatttttattttttaataaattaagcttgttaacaattaaataattaaaaaatatttgtcatttggatatataataaatagacaagtattaatcaatatttatcatatacttagattaatatttaaaattggtcacaagaattaaaattgtaaattttttaacagtgagagatgaaatgtctcgagagagactaaaatcataaatttttaaaaaatgagaataaaatatttaaataaaaattaaaaaaccaaaatggtgaatttgaaaaattaggaagaaaaaaaatgacattataaccaaattttaataaaaatatactaatatgatacatggtggagcccacaatatacacaagccacatgctattgaggttcccttattccataagttacttagaagacccgagatagcgaaaaagagtccataatagaaaacccttaatatcctaaaatcccttcatagaaaactactcaccctaaacccaaaaggtcaatttaccaatttttttttatagttcccatgcacctaacgtaagaaatccttcaccttcacttctaaaatctcttttgccaaatccatcaatctcactcacacactccacactcacacaaatcagaattcacacccacacaatctctcagaattgaaacccaccatgttgatcaaagggcatcaaattaaggcaccaatttttgtcctcaatttgttccttgtcctaatttgttccacagcttcttccgtcaacgttgttgaatcaaggaaacttgatgagactactccagtgcctgccacaaacggtactgaagaaaagtgtggatcatgtggaggtaccacttatccgtcgccaccgccaccgttactaccaccaccgtcgccaccaccgccatccccaaagaaaacaccaccctctcagtattgtccgccaccaccaccgtcatcattcatatacatcacggggccgccggggaacttgtatcccgtcgacgagaatttcagcggagccaccagccaccaccggagtttcgccgccgtgttgatgccacttttggttggcttgtttagcacgcgtgcgttttagtgattcgctagtgacgaaggaggtaattaattaataatcacgatgtatcattcagatcattctaaatacagtgaaagaattttatggttcatgatgttattgttgtagttatgaataccaagaatttacgtaaggtacggcagggagaattttgtactccgtaattagtgtttgacactatgctctgttctttttattatgtgatcacagtttgttcaataataacaatctctcttgtaattctctgtcaattttttttttaaaaaaacgcatgtctcatctgaggaactccaatttattttatcacatataaattaatatttgaaactaaattctattaattttaatggtcggatatgcatgcaatttctttgaaactgtagaggatggggatcaattcacttttcatcttaacaaagtttaattttcagatgcactggtaatcccaattttcgcaatctcaattaattagaaaccagagaaatttgagagtaacatatttttaatacactactacgaatatatttttattattaactaaaatttattaaaaataataatttttttatgaacctcgttttttatttaacgagactttctttttgaattttatattttcaataaattttaactaataaaaatataatagaaagtgttattgacactcatcttaaaaactaattagaaattaattgctgattaattttataattattataaaattcaacagttttactatataactcaacctataattaaataatagtgtaatgaaaaattatattataattctaattaaagtcaatattatttttccacgtaatttcccgaaatgtgaaaaaagggatgaatggttattgatggatcaaacaaaaaagtcggtgctaatcaaaatcgagtgctagctgcaatttctgcattattaaaataaataatgttgaattgttgacctatatcattaattatgttgaatacaacgggtcatccaccactttcatcagctccataccattgctttcacattgatgtctcaattatacacaaagttcattgttgctaataatggtattcttaggttcggcgtagcctatctatataaataacacatggcaaataatggatcgcagaaataagagaagcattaaccccaattcagttttgaatttccagttgttattttaaatttaattagaaaaggttaataaaagtaatgcttgtgatttttgaacagcatatatggaagtaacacacactgaagtcttatggataattatactctcataacacttttatgatactttttacaatttaaaagagaaatgtttttttttttgttgctttggataagatgagtaatgtaataaagtgaaaaaaatataaaaatgttataaaaaatcattataagaataagattactcaaattttatttcaccaaatatattggttgcagaggaagtctcacagttatttattcaagtataccggcgaaagaaaagaaaagaaaagttaattttgaatttttttagtttaatattggcagcagttagagagaaattttgacatttaggatgattatccgtaggattcatagaatggaatagtcacctaagattcgttagtatttattattgtatacataacagtagctctgtatcagaacttataattatccttattaagaggccaatcaaaattatcaaaaaaaacaacaagcagagaggaccaaactctttagacaagccacgtttgaatgtgcaatctcatctttatcgttttataagtggatgaaagcggagtagtgaccttaaagaataataatctgttggatcctgatgtcagagttcaattcatgtttgtgaaatcaaacgaatcatctatgtcagtggcttgaaacatcaacttcggttacaccaaccatgcatagagtggggacccactaatggttgatgtttggcaagtttagcctatttgtatgtatcttttcactgtttgatccctatcagtctatcaccccactaaagaaaattccggtagacaaaatttcaatggggacacggattttagttttgaaaattgtttagactatctatatgttatccaacaattaaataaaatgtgtttaaaataaatgatgatttatgtattattattttttaattttattggtcgcataaattacagaatcaaatggattaagtttaaaacttttctgtttgtccttgagttctattgaaaataccccactataattgtttagtgtagaaatgcatttaagcagtactagtaataacttactgttttggaatgtttatccaaaagtggagtacttttacttttcataacgcaggacaaaatgtcactaaaccaaactattgacaagttgtttgctatttttcattttcatttcatcacctaaccaactacatattatccatttaaatacaataaagtaacttatatttgattatatgttttttttaaaagggatttgattatatgttagatatagaaacatatagaaattattgatgagctttcactcacactcttaataggactgatcaccgacattgtatttcctgtgactaataattcgtttactgtacaatctattactcacgattggtcttaataattagttattaaaatagttatgattaattttttatatctttttacattttttgtgtacttcgttatagtggttaataatttatattgactaattgtataaaaataaatttatattcactaactaacaactagcttttctgagttattaggttttcttatgatgttttcaatttattatttaaatattaactagctactaatatatttgaaaaataagcgtaactagagatgtcttaaattcaaattttagatatatatacaactgtattaaatatttattataatttttttatcacttataatagttctatcatgttcaagtaaattgtctctagtaaaaaattcttatatgattcatacaaaaagaaaaatcagctaaaaaaagaaacagagtcatataaataagtatagaaaagtgtttttaccaaaataaatgtgtagaacagtgtctgtgtataaaaatacaagactgcagttataattttctataattgcttaagtggcattattcagacaaatcccaccaccctttataaatcactaacgacattcattaaaaaagaacaaataagcttaaaggcaacgagtttgtcagtttaacctcatttgtttgcaacactctgttgaggactagcttgagaagacatcacttaatattagggtgtgattgaaactggtgcacctatgttcaagggtgtaattatttagggcgttgtatgacatgcatcaaggtgtatgtggagtagtttattttttgcttgtcttttttgagtggaggtaaaaaaaaaaaaactacctgttcccacataataacaaagaatttcaggcttggtaaatatgggatttaggagaaacattgcacttattttcttttgaatgatgaacgtgtcgcatatcatcgttgatatataagagttgaccttggaatagttaacgttacaaaataactaactatttatttgcttttttttttaatcagtaaatattagttttttagaaatattaatggaaagatttgtatccataaccttttttttcccctttttttaccttaagcttcatttttcaaccactggatcaatcttatatcttctatatacagtgttcatagtagtatatgtctgatgcgaatgactattctgctgttaaggttatgaacaataggatctaacacaaaaaaagaaagtgacaagttcaaagttactcttaacccttcatctttcatgtgattttttaaaatttaattttgacccttcatgtataattatatggttcaaattttattctctcattcttatataaaatacatcatctcatatgtatattggtaagaaggatgtagagtactcaaattttaacaaatcaaagcagaatgtgttttctctacattatggagatctaatgccatatcttaagtcttaatataagaaagacagggttaattttatctagttcactgtcattcctcacttttcatctagaaagcaatttgctgcttctgctaaataaaattggagaatatgaaagaatgtataatagatatgcaagaagggatagctaaaattaggtatctagtgttataacaaaagctattacctatttacctatttaacttgcagtagagaagactagttgagtaaccgggaaattgctcatgtaaatccgagaatagcatgatggctgatatcctacaaacagaacataactgaattttgataaataaataaaaacatgtaaagacaaataaaacataaagaatgggttaaattgtttctataaaaacttcaatttcacaagcattttcttattaaaaaaaacacttttaagcacaagtttacaaaaaaaactttaagattcactcagataagacgatgtttcatgctataactgtccattgaatcttaaccatgttttgtgaaaaatacttcgtaagacaaagaacttttttatgacaacaccaactattccttttaaataagttggtataaatgaaatgtaaaagagaaagggatgaacaaaagtacataatatttttcttctacataatattgtactagttcatctcacactcaactctattattcttttgtagttatattttgtctgagttgtgcttaatctcacacttaatttaatgagaattgtacttaattaatataacatgtgatagttataacaaaatcttgaatggcaaaatttatatatatggtcccgtccgaggcattactttaaatctgcatcggatgccctacaagactggaaattcttgaagctcacgtctactctcttgttttggtattttaatcaagagttttaaatcaagtacgattatcactaagaccacaaattatgtaatgaaagataaatagaatcacatttcattaaagctaatgtattttgttcataactttatattaagacaaatactctgtaccctcccccccacccccattcttgttttttcctttcgtgagtctaaataaaatgtctcaaaaatagaagaaaacttagctcatgcaaaagtttgtgattgagagtattagaatgaaatagcctgtactgtaatgttggaccaaaaggtaaaacacaataataaaagcctaaaaggcaaaagagattgtgaatttcaattgccttttgattgggattgaagaaacgcacagaattacatgggcgaggaaggtggaagaaagtttcaacatagaaggttgagttcatattggctactgaaagtgtgcttttcgggatggagaattattgtaaaaaaattgactttgaaaattgaaatgcctctgagaagtatttttagtttacgtatatactttaatttatttgtcattttagtccagaccatgtctatggtgggaaaatatgataggtggtttagagtggcaaagtattttatgattattagatatattagttaaatatttaatgattaagattgtttaattgttacttattatttcagtttttaaaatttaattttgttttgcttattatttttcatattatcttttaagtctttatctttgaacaatattgttaggattcaaatcctgtcaaccacctccatttatcacaatccaaacactattactcaagctaatgaaccaatccaagaaaaagtgatcgtccactagatttcaaagcaatgtaaagtctaaaacacaacaatttgtaatactaatcaacagaaaaaaaacataacagaaaaagaaacaaaaatccttttgccactagaagattcaccgaatgctaccattggaagcgatttctggcaaggacacttttttctcctcctttcttcctattcttccactctccttctccttttccttgtctttcttcccttcactgttagccttccatggccgcgcaaggcctggcacgttggcgacgccgacgcacaacgccttttctcctctcacccaccttttgtctttctttctccaatagtgcgtgaatcacaccctagaagacaccgaagttgttgtctgatgcttcctccattttgatctaaagatttgctttgcaattagatctaatttacacttagaagtcagaacaagtgaacaacagctcctaaacgttgttacacacgccacgctacacgtttatttcttagatttttaattacttttttaatggggggatctaatgtcattgtcaaattttaaaaaaaatgtataaaagaataaattgatttaaccacttattcctcataaaaaaaactttcccaccctaaaccacttatcttattttcccaccttagacttcatctttagccctttgattttatttttacgattggaaattagcttagacttcatctttagtcctttgattttatttttacaattggaaattagctatatgaagacaacgtgaatatttaacattagagagactcaaatcacacataaactaaaatgcaataaagcctataaaaaatattattgttagttaagttaaaatttgagattacttaaactcacatcaaacaacgttaactatatatatataactctaaaacctaaatatattattgtataccttttattattagcacatgcacggtacaaattaataagttgttagtctgagtagaattgagcacaaatctcttaaacaaaattttaagtttgagtcttgtaaataaataaaaaaatgttattaggaaggaatactccattaaaaattattagtcaaattttcgataaaaataaattattacaaaataagtagatatttcacatcaatcaatagtatcgtaggaaactttctaactaaatttccatcaaagttcatttcaagggtttaacgtttgtattccttcttcaagtaaaaaattaaattaaatatagaaattgaaaaaaaaaaacacaatttaattcattcaaacaagttaaatttataacaagttataatcaaattaatcaacctaggtaaacctagacataagcagttaccaacaagggttgagtatagtgaaaaaaattagtctccgcatgatgaaccaatgttagaattcttgcgagaaatatacacacatttaatgtccgattgtactccgtcctgaactatctccaaaaaaacataagggaataattcatttggttagcaaatatttttacatcacttgtatacagaatgattgttcatttctagtcaataattagttactgtaggtaatttataatttctttgaagaaaaaccaatactttttttttatcaagtggaaattatttttttattattaaaaatgatgattaatacatttgttctatgattttcaatacaccttaacataattttaaataaaactttctaaactcattttagtcgacttagtggtgaggatcggagtttgggtagcttttaaccaatacctttgagatattaattagcaagactcgtatttttattaattttaactgaaattttgttttaaaaaatgatatatattgaaatatttttaactatctttctagtcaatcaaatatgataatctagaagaattaaatacatgtgtttgattgtgttttaattttttagattataaagacaatttttgaattatttttagaaaaaataaatatagcaagatgtaaaagtgcaaaaaataacatgaataatagaaaaataatcataaaaaaccaaaataacctcgaaatttctagctttatgattttaaaaaactaattatgaaaagaaattaattttgaaagcaattttaaaagctattcttttaaatagtaagtattttcgtttttcatttttaaatagaaaatggtattcaaaaacaaaaatcaaagagtcacttaatttctgaatttattatccataaaagagttagaagttttactaattttttccttttttaccaagttgaagagttatccatccgtaaaagcttgtggttctaattctaatatatatcttgaactaaatatatatggcttatttgggatgggaatcttgtgcactcagagacatgtgcatgaacccaaagaagaaaacaaaactaatcagaatcttttgaagtgttcaactgatttggaatcacatattggtagctataaccactatcacacgtcaaataagtgtgtttagtaacaagaaaccaactacatggtcttttccaccgacacaatgagaactcagtaaaactaaaaattagcacccccacctaattcacctttaatttcgttgatgctattatatttttaacccaaatgcactcaatatttgggactaataactcttattaagcacgataagaaaaccaagttcactattataagtattatttgaatgtagacatttgggtcaaatattgaacattaaagtattatgcattgtagctttctttcattgtagcagccaacaaagtgaggctatgtgacacaacatggtgtttcggttatggggcacgcgtctaatcattcattctcacacattatttttttttctccagctgttcttcaattttctttcttgcgtatggaatgggttttggtgatttgaattacacttgtgaagtcagcaaattggacactagcttcatttgtaatattgtccacatgctccctctatgatttgattctcccagtcctcgaaacaatcctgttttgattaaaaccaagtatctctacctagaaaagtttataactaatctatatttagataattagatgcaataacagtaacagttagatctctatatattatgatgaaagaaactgaacttttagtctataatgtggttgtgctaaagacataactgcattgaagaattataaaaaattataaatcaccaaattgtatatagtatgctgagtttgtactttaattggtagcttcgttcataaaaagttgtgatgaaagatttgtaacttggtccatcctaagcatattatattttgagggggttgtgctgttttatttatattcttttctccttaaaagacgaaaagaagtcatgtaatatatctcgatcgagcatcaacaaatatatatttttgtcatatttctaatatattttatattaactaaaatctattaaattgtattctgtcaaaaaaaaattttattgagttctattataataaaacctatataaattaatttcacttataagttataaataaaaatataatacataaaaattatattcgtaccatacaagcatttctagaaaaatattatacaaatatctcacttatatatgatggcgtgaagaccgggctcgagatagcttttgccttttggtcttccattattcagcaaagagtacttttagtgaaaaagattttatgaagaaaagataaaaaaaaaggctatgttaataataacgggctttaaagtttgaaaaaagtctaaataaactttttattatatatatattatgttaattttactaaaaaaagtataatattttttgaaaaacagtctatggactaacaatgtcacgattcttttgtttctttttattatatatattttatttataattttatcctttaatgtatcacctttttataaaaagtgttgagggaatatagtagctattcatttggagataaactggccttattagtgactaatgaatattacagcaatacagcatacatattaaagtgtgcatcatgtagctaagaaagtagtatgttcttggcttcttgctactaagatcctttgaaaattcatggcacatatatatcttataaattatctgaaaaaagaacttccattcgttgtctttcgttgaggataagcatccttttcatttaggagacacataacaaccaaaagcaatcaaaaccagcagcagttactgtcatttgatgtcatcgagatttgccttttactcctccgaaagaagacctaaattactctttggtgctaattttgctagttaagatttgaaaaggcataatggctgcactacttgtaatcaaatcattcaaagttaattcaacttaacgattaaggatgctgcgtcgattgcatatttgcatgcattttatggtaaataaaattatcatcttttttttattgataggaattaaaaataatgtcaaaaaatttataataattcagccatcttatttaatcaattaagttagatatcttaacaaattgtgtactccataatgtcattgtctatccattgttacacgctcaacatacaacttaactcggcatatcatatcactatatatacgagacatgatttgctatgatactatatattattttcacgaaaatatcaaggatgaaaaaaggtacatatgatacttataaaaaaagaaaacatgagctgttttactaaaatcacaaaatggagtttgggatggacttcaaaacctaatcatttatcatatactcttcaaattaattgtttcatttatcttgattgggttttggtcttgttcatcactccataacaactgcatgtcccttgactgaaattatattagctaaaattttgaacttagcttagtaaaaaataatgtattagtattgaaggaaagggcactgaattgaagttcatatatccgtgtgtattgttactttaaatcagctaaaacaaaaagaagtacatatatagttcaaataaagtttgaattccaagaaattttctccactgatcaggtaggcctggctaaatatattaattatacttctcatttcgaagaaacataattcttcaaggcccaaggcatatgtagcaagggtctatttttttttttattcttttttatattactttttaggctaaaaggttggttgaagctagctgtgacctgtcaaattaagtaatttcatttaatttgaagatgctattgaaataacatttgaaaattgaaaatggaattagtttctttctattgaaccaacccccacccttctgtttataatcagttgagaccagactttgatcgtattttataatatcatgggttttgtaatgaatccttcctttttgtcgtaggcatatcatgtgcaattattattattattattctttgtaaacaaacaatacaagtgtttcttctatactaatcttaatttccaatacctcaaatgaaggagtttgctgtcctgcatcctcaccacccatcaccaactccactttgatttttcctctgtccaattaaatgcaactaaaccgctttagggtacgtaataattaactactcaataaaccgatttttttactataattttcttaatcattatgttgagaacaatgaatagctaaacctaaaaaaagcaccaactaactaaaacaaagttcatttaagtagtgtcattaattaccatgaccaaaaatttttaacatctacgaagcacatgcttgacttctccttgctcataataatcacatccaagtcgctataacttcactttcaattcttagcaatatgtagcattgttttccattgctgaaaatatgacaaaatacacgtagcgatccaataagtccaccacacacacatttcttcaaactcacttcttcctttcctcaccttaattccattcactcactctctcactcacaagtcacacccacttggttccttcctccaccccatttttttttctctttttttcccatccaaacatgtcctccacacacccaaaaaacccagcaacaacaataacaacatccactactctcatcttgctctcaattatactcctttgttttccaacaacctcaaaatccgacaaccctccatgcccttatccatgttacccaccacccattggaacggttactcccacaaccccttcagttggttccactgttccaccagctccacctcaacccggattactatatccaccaccttccgggaattacccttattaccccacaccacctttcggtggcggcggtggcggcggcaacgacggtagcgggggcggtggttttggcaccccaccaccaccggaccctattctaccctactttccattctactacagaaagcctcctcacaagccagaagataattcagcatcaacaaccactatgcacaaatggacagggatggttgctattactagtctattatcttcatctttgcttcttctctttgtataactctcatgaatcaggatcaaaatcttcatgtactatctaaactcttaattttatgcttgttaatttaatgattttttttttatataatgttcacattgaaattgcaacctataatcttatgcatattatttcaattttcagttattaggctgatcttagtgggtaaatttaatggtaatttattcacgtttgtgttgtgtttgagaaaatatgttatatctgttgttgtggatgtggattttgtatgtgtgtgtggttctacaggggaaggggaaaaacagaggaggtgtgattagatgaattttggactagaagaggttgtaaagagaaaaaacaaaaaagataagaacgaaaattttgcttggtgttggatgatgtaatgtaattgattgtaaatttaattaaaatgtttgattttgagcatttttgtctgaatgctataattattaggatagtgtcaccaccgctattgcgctataggtgtcacctgctttggatggttgtgtatgttgttgtccttctaattaatttcttccttctttttgttctatttttcttcacttgctacttttgttgatcgttcttaattttatattaaaaataagaatttttttataaggatggtttttacatattgataattttgctttcatctctcttccataaaaaaaaaaaaaagacaagtgaatttatgagtgtattcaaaacatgaagtaggagtagaataaaacttgttcatggaaaagttcttatttacggactttttatttatttatacataaaaatcatgtaaattcaaataatgtattaaaggttatattattctaccaacaaataattatttgagtggaatgaagctcaaattcaaatattgtggataaaaataatgtgattgagagaaaaaaaaaatcaagatattcaaagttttttganaataaaacttgttcatggaaaagttcttatttacggactttttatttatttatacataaaaatcatgtaaattcaaataatgtattaaaggttatattattctaccaacaaatagttatttgagtggaataaagctcaaattcaaatattgtggataaaaataatgtgattgagagaaaaaaaatcaagatattcaaagttttttgacaaaaatttactaatgagttatttcagtcaaataatttgtgtataataaatatatatttttatttcatatgttatatgaagaatcgttttattttaatttatattattttataaatagacatataatttcttgatgtgtattcatttatgaatgatcaccttatttcacttcatgtctattcaaataatttccttctcaaagttcatataaacccatattattttcttttctaaaatgatgatttgagaactttaagtagacgggtgcttatgaaaaaacttaattataacaattaaaaaattaaaagataatatttgggttaaaaatattaggagacataagtagaatagtagttaataatagtgaaaatataagtattattaagtaaaannnnnnnnnnnnnnnnnnnnnnnnnnnnnnnnnnnnnnnnnnnnnnnnnnnnnnnnnnngcatgtactgattttttaatattcataattaatattatcaataaaatttatgaaaatcttataaatttgttgggttattttctaattgaatatctatgtaatctattttaattcttatgttggtagacatttgctttttgtttttaatttttaatgaaaattaaaattttgtaacaaattttaaaaaacagaaatgattgaaaatatgaaaagtaaaaaaaaaacatggataaaaaaatctctcgaacttgcagtaaggaaaggagaaatgagaccaaggtaggtgacagaaataggagggtgaaagaggaatgaatttgcctggaagttccaatttaacttttaagttaagcaagcataatttctagtcaaacataagagtaggggtaagtcctgtaagcataatattaactttaaataaaataaaatataaatgaataataaaatttaaaagaaaactttatctacatcactcaaacatcaaataaagcaaaaaaataatatcactgactttttacataaaggaattataaatattcaaatactaagaaagagaatatacactatacaagtaccaagtagtaaatataaatacatcaataaagctataaaaaataatatttaaaattgtaattgttatgtgagttgacccgttaacttgagaactcaactaagttaaatgaactagactaaataattcatgtttaaatggatcaatagtcttgtttggtatgcaaattaaagaaactgtatatgcaagtccaaaccatgtatctgttggagttttttgtttaaatttcatgggttatgaataagagacggttaacaattcaaaataataactactcctaaccgctcttgggaaatgttagaaaaataactactcttaaccgctctgataaccaacggttacgatggttcatcgccaagagtcacgatggtttaccgacaactcttcaacagagttgtttgttgtctataaatagacacagagacagtcagaaaataggaagtaaggaaaattgatagagttttgatagttaatcttttctgatagtctcgcttagaaactagtgcatttccatatcacataactctatggttcctcaagcattgtctttgttcgtttggactgttgatttgaagtgccatcaatcttcagacgttgttccgttctatcctggaagacaattgttcataaacctttggcatcaattggagggaacaaattgtcttaaggagacaacattgttgggctcggatcctttcatctctttgcatttgtgtctgattcatacttatcatacaagttttatttaaattggtttttttgtacagttgtagtagattatattgttcatcttgactactcagattctgacccttgtgcaattggatatattccaattctaaattaactaatagttccaacaatcttaagacaattttgctttgaatttgggttcagtatactctatctttgtgaattatatactgttgtctactctctgtactttacacaattaatctgtgtgattaatcagtgttttcaagtatgtgttgaatcaaagttttcaaaattacatttttcttctgttgatagatcaactgaattgttagatttaatacatactgatatatgtgatatgaaatatgtaccatctaggggtaataaaaaatattttattacttttattgatgattgcggtagatattgttatgtctatttacttaatagtaaggatgaagcacttgtgacttttagacaatataaaaatgaagttgaaaatcaacttaacaagaaaattaaggccataaggagcgatcgtgggggagaatatgatggccccttcgaggaattctgtatagaatctggggttatacatcagacgactgctccttatgcaccacaatcaaatgggattgcagaaaggaaaaatcggacattaaaagaaatgatgaacggtatgttaatcacggtttaccacagaacttgtggggggaagccattttgacgacaaactatattattaatagagttcctcacaagaagacaaagagcataccatacgaagtatggaaaggaaagcaaccttccttgaaatagttgaaagtgtgggggtgcttggctaaggtcatggttcctaaacccaaaaggttgaagatcggaccttaaaccgtggattgtgtattcattggttatgcacttaatagtagtgctagtcgatttttggtttataaatccgatgtctcagatatacatgttaatacgattattgaatcaagggacgctaggttctttgaggatatatttccgtataaaaaggtatctgaactaagtggcaatgacaatgataatgttgtgagacctcaagaaactacaactagtgttaatcctatagaagaagaacctagacgtagtaagaggcaaaagactaccacatcctttggacctgattttctaacatatctgttagaaaatgagcctgagacgtataaagaagctgtaatgtccccagaggcaccattctgggaagaggctatcaatagtgaaattgaatccatcctgtcaaatcacacgtgggaattggcagaccttcctcctggcactaagcctctaggaagtaagtgggtcttcaaaaggaagatgaaggaagatggcactattgataaatataaagctaggctagtagtcaaaggctataagcaacgcgaaggtctcgactacttcgatacctattcacctgttacaaggattacatccattaggatgttagtcgcgctagcagcgttgtatgggttagaactacatcaaatggatgttaagacagctttcttaaatggagacctagaagaagagatctatttagaacaacctgaagggttttctgttccaggacaagaacgaaaagtgtgtcgcttaattaaatccctttacggttaaagcaagctccaaaacaatggtatgcaaagtttgataaagttatgttatcaaacggttttagtattaatgaatgtgacaagtgtgtctacattcaaaatactgataaagggtttgccatagtttgtctttatgtagacgacatgttgataatgggtagtaataatcaaatgattaaatctactaagcaattgcttgccagcaaatttgacatgaaagatttgggaagagcagatgttattttgggtattaaaatccatagaacatcaagaggtttgactctatcacaggctcactatattgctaaaattcttgaaaaattcaagaatttaaatataactcctgtgaataatcccatagactctagtcttcgactatcaaagaatactggcaaagctatagcacaaaaggaatatgctcaagtattaggcagtcttatgtatgttatgaattgcactagacctgatattgcgtatgcagtgagcatgttgagtcgctttacgagtaatccaaacatgtatcattggaaagctatgataagagttttaggatacctaaagcacactcaaaaactttggtttgcattatgaacagtatcctgcagttattgaaggatattgtgatgcaaattggatcaccggttctaatgatactaaatctacaagcggatatgtgttcacccttggtgggggtgctgtatcttggaaatcgtccaagcagacttgcattgcaagatcaactatggaagcagaatttatcgctttcaataaagctagtgaggaagcagaatggcttcgtaattttgttgaagatgttcccaattggccaaaaccagtaccaactgtaggcatacattgtgatagccaagcggccattggtagggctaagaacatcatgtataacggcaagtctagacatatacgtcgtagacatgataccgttagacaactactcttgaatggaatcatctcaatagactatgtaaggtctaaagagaacatagcggatccattaactaaagggattcctagagagttagttgaaaatttgtcgaaaggaatgggtttaaggcctatcaattgttgatcatcgcggtaactctaccttgatgagtggagatcccacgaactaggttcaaagagacaactaagtcatgatcgactgttaaacactgtggagtttttaaactcatactcattcctatgacaatacagtgtatatgagggtaagcataatggcttttaatggtttcttaatctgatgttcagatgatgtatgtggaggtatatcacaagaaatcacctatgtgagtgtgaagtgagggtcgcttcaatgagaacttaaaaaggccgattctttacaacacttgcagaactaggaaggtgtccacggccaaaatggacacaacaatgaggacgagcaatgctagaaaagcaattgtgtgtctcctattgtctcggtatactccataaaggtcgatggttcaaggcatcacgaccaccgattgacctagtatacccgataggtttacactagagaaggttcaaaggtaaccccctacctatctcgatgcaattgtttctcgccgaggaatcacacttgcatacatattcatatgcatttagtcatcatgttgaattgatctcttattcatgtgggggattgttggagattttgtttaaactccatgcgttatgaataagagatgattaacaattcaaaataataactactcttaaccgctcttgggaaaggttagaaaaataactactcccaacagctccgataaccaacggttacgatggttcatcgccaagagtcgcaatggtttattggcaactcttcaccagggttgtttgttgtctataaatagacacagagacagttagaaaatagtaagtagaaaactgataaagttttgatagttaatcttttctgatagtctcgcttagaaactagtgcatttccacatcacataactctgtggttcctcaagcattgtctttgttcatttgggctgttgatttgaagtgccatcaatcttcagacattgatccgttctatcctgggaggcaattgttcatcaacctttggcatcaattggagggaacaaattatcttaaggagacaacattgttgggctcggatcctttcatctctttgcatctgtgtctgattcatacttatcatacaggttttatttaaattggtttttttgtacagttgtagtagattatattgttcatcttgactactcagattctgacccttgtgcaattggatatattccaattctaaattaactaatagttccaacaatcttaagacaatttgattgaatctgggttcagtatattctatctttttgtattatatactgttgtctactctctgtactttgaacaattaatctgtgtgattaatcagtgttttcaagtatgtgttgattcaaagttttcaaaattatctttttcttctgttgatagatcaactgaattgttagatttaatacatactgatatatgtgatatgaaatctataccatctaggggtaataaaaaatattttattacttttatggatgattgcagtagatattgttatgtctatttacttaatagtaaagatgaaacacttgtggcttttagacaatataaaaatgaagttgaaaatcaacttaataagaaaattaagtctataaagagtaatcatgagggagaatatgatgaccccttcaaggaattttgtatagaatctggggttatacatcagatgactgctccttatgcaccgcaatcaaatgggattgcagaaaggaaaaatcagacattaaaagaaatgatgaacgctatgttaatcaagtccggtttaccacagaacttgtggggggaagccattttgacggcaaactatattattaatagagttcctcacaagaagacaaagagcataccatacgaagtatggaaaggaaagcaaccatccttgaaatacttgaaagtgtgggggtgcttggctaagaacgtcttgtataacgacaagtctaaacatatacgtcatagacatgataccgttagacaactactctcgaatggaataatctcaatagaccatgtgaggtctaaagagaacatagcggatccattaactaaagggattcctagagagttagttgaaaatttgtcgaaaggaatgggtttaaggcctatcaattgttgatcatcgcggtaactctaccttgatgagtggagatcccatgaactaggttcaaagagacaactaagtcatgatcgactgttaaacactgtggagtttttaaactcatactcattcctatgacaatacagtgtatatgagggtaagcataatggcttttaatggtttcttaatctgatgtgttcagatgatgtatgtggaggtatatcacaaggaatcacctatgtgagtgtgaagtgagggccgcttcaatgagaacttaaaaaggccgattctctacaacacttacagaaccaagaaggtgtccacgaccaaaatggacacaacaatgaggacgagtaatgctagagaagcaattgtgtgtatcctattgtctcggtatacaccataaaggtcgacggttcaaggcatcacgaccaccgattgacgtagtatacccgataggtttacactagagaaggttcaaaggtaacccctacctatctcgatgcaattgtttctcgccgaggaatcacacttgcatacatattcatatgcatttagtcatgttgaattgatctcttattcatgtgggggattgtttgagttttttgtttaaactccatgggttatgaataagaggcggttaacaattcaaaataataactactcttaaccgctcttgggaaagattagaaaaataactactcccaaccgctttgataaccaacggttacgatagttcatcgccaagagttgcgatggtttacagacaactcttcaacagggttgtttgttgtctataaataaacatagagacagtcagaaaataggaaataaggaaaactgatagagttttgatagttaatcttttctgatagtctcgcttagaaactagtgcatttccatatcacataactctatggttcctcaagcattgtctttgttcgtttgggctattgatttgaagtgccatcaatcttcagacgttgatccgttctatcctgggagacaattgttcataaacctttggcatcaattggagggaacaaattgtcttaaggagacaacattgttgggctcggatcctttcatttctttggatctgtgtctgattcatacttatcatacaagttttatttaaattggtttttgtacagttgtagtagattatattgttcatcttgactactcagattctgacccttgtgcaattggatatattccaattctaaattaactaatagttccaacagtatccacccctacaactacatgttacatcacaattcacaacttcactaatgagttagtgtcagtgcagactaatttaactaatataattatagggctttctccaaaactcttgtatatttgtagtgcaagttctccaggagcaatgcagtaacaatcccattagaggggctttctccatcaataggaaaaacttttctacttccatgacagggttttctcttcacttttgataaattcttttctctccatagtgagaatttcaattgtctttttatgtgtgtgtgtgtgtgtctataccaccttgattgttctctaattcaaccaaactgtcttactcatatttattgttttctgtgagctcttttacatatggtactgttctactaacattaattatggaatgcttatggtcatttcaatttgagttgttgctagtctaaatctaatccacaagaaattacaaaagaaaaaatataaaaaatgctcaagactctatcaaggtctctttaatataggagtatatgttggtaattcaaaattgatcttatgtttaactaaaatatgctttgaatatgcctgtttgattgattgttgtttatgagttgtgcactacatacatagtaatctttcttaagcatcatgtctttttacaaagtgttgctagacattttcattgatctttttgaaaggaaaaaaaaaactcaccaaatttaagtttttttttcttttttaagaaaacaaaatttaagctgtgacctgtgagatttatttaacattcttccaatttcagaatttattataacaatatgtagtaagaaagacaaaaatggtagtgtattatttttttcttaaaaattaaaaatgaatgaaaattggctctaaatcacaaattctggctccccttgatttagttaccaatttagtctacattatttaaaatatctcaatttgatccctaaaattttaaaattttcaatttgatcatttaatttttaaaaatatatcaattatgtttcttctatccaattgagattgacgactttaaattgatgtacacgtgacgtcctatggttattcacaatcttaacagtgccatcctcaattgtatagaagagatcttattgaaatattttttagagaaaattacaataatctctcttgtagtatcctttttttgacattacacaaaattctctaacttttgtgatcctattacacttgcactccctctatctttaatagtgttaacttcatttactttttagatcatgtggtcgatacatgacttttatgaaaattttaatcccaaaattatcctcatttccttccttttcgtttaaaatactatttatgtcacatgttctgttgcatttttttttatatttcaactagtgagagggaaaaagggtattgggtgaaatttttgtaaaacagagaagggcacgtgtattatttgtaaaagataagggggtacatgtgtaacattttgataacatcaggcatatgtaacattttcaaaacttcagaagatacatatataataactttaaacacgcaatgaacgagagcacgtgtagcaccactgcaaaggcgaacaggaacgcggaggaggaactaccactatgggtgtgaaggaagacaatgcaacaatggcgaataaggaacgtgcaactccacatttggttgcccggagaagacgacctagcagagtggcacgagacaaaaatttaactattagatcaattaaaaatcatagacaattttgaattttcctaaaaatgaattcaaattaatatatatatatatatatatattaattttcaaatgacaatttaacactcttacaacttagaatgtcaatataatgatttaaaaaaaacatgtataaataaaataaacctactaaagaattttgtaatttactttattttttaagattaaataattacattaaaacgtttataaatttgagaaacaaatttatgtattttaataaattaagatactaaattgacaattaagccttttccatttacctttcctccctctacaagtatgcatgttgaaatgggctataacttcgagcaaatcgtaactctcgcttgagggaacatagacccttatcatcccttgacacctctcttccaaaatacgctcttgccaggtacactaaccctctccacttgttttcattattttcagggatttctcttaatccctaattgcgcttatgctctgttctctataaatttggtaaactgcaacgaacttgattaatagtttgagaacgaaaaattctcttgggaaagaaagaaaattaatatagtgttgccgtttagtgacaggcagacagcagagctaggtgctaaaaggtcgaagatgtatatgaacccaacccaaatgaaataaacgccgtttttgtgttcaggcaattggaatttgtcaccccattttggcaagttgaattttttccacaaagaagtgacaaattccgatggctccaaggtactgcaatatgcgcgccatttgtttgatgaaagtcctgctgggtcattgagatgtttatatacttatatgaggataattttctctgcaggttctgaatgacaaatgcaacaggcacatttttaattcctacttctgaataatggactgcacagtgtcgtttccttgtgtgcattttattccggtgggaagaactttgtgcaactacagaagagtcactttagtagcacattcaaaaaggagaagaccaccaaaggataatcggtatcgaccacgtgccaagcaacctccagagtttggtgttaatctgttcttgaagaagcctagcaccacctctaaaccaactgaggatgatatggatagcaatgaagaggatgatgaagaggatggaaatattggtgttgtttgggaatcagatgagcttgaagccatctcatcacttttccaaggtagaattccgcaaaaacctggaaacttggatcgagaaaggcctcttcctcttcctgttccctacaagcttcgacctttggggctacctacaccaaaaacacaagtaaaattaacagctccagctgtggtttcttcccgggcttctatggctaagaaagtgtataaaagcccgatgttcctagttgggttggcaagagaaataagtaggcttggtccagatgaagatgtatctaaaattcttggaaagtgggtgcagttcctgaggaaagggtccttgtcattgacaataagggaattaggtcatatgggattccctgagagagctctgcaaacattcttatgggcacaaaatcaacctcatctcttcccagatgattggattctggcatcaactgtcgaggtcttggccaggaaccatgagttaagaattccattcaacctaaaccagtatactggtttggcaagccgtgttgtgttggaggcaatgattaagggttttataaaaggaggaaaccttagacttgcatggaaggttctaatagttgccagaagggataaaagaatgttggattccagcatatatgctaagctaatattagaacttggaaagaaccctgacagacacaggcatgtgttgcccttgttagatgaactcgcagaacgcgatgaattgaatttaagccagcaagattgtactgcaataatgaaagtctgcattaagatgggcaaatttgaagtagtcgagagcctgtttagttggttcaaacagtctggctatcaagtgagcgtagttatgttcacttctgtgattcacagtcgttacacagaaaagaaatacagagaggcattggctgtagtttgggagatggaggcttcaaattgtctttttgaccttccagcttatcgtgtggtaataaaactgtttgttgctttgaatgatctatctagggccacgagatatttttcaaaacttaaagaggctggattttctccctcttttggcttgtacaaggacatgcttcaaatttacatggcctctgggaggatatcaaagtgcaaagagctctgcaaggaagctgagatatctggtttcaagctagataaatatcttgtgtcacagttagatagatgaaaaactatagactttagaatcctgcaagcattgtcattgcttgtatcaattctaaatccctctttcttatgtaatggcttggcttccttttgtacattgacaaacataacgaattcttttaacactgaggttaatgatttggaatgtttaatacagttgaatttactggttcagtctgcatttttttccatcaatgtgtaatacctcctgaatttagttactgcatttggtgttgtaacttgtaataccttctgaatctgagttaggagcagaggatggtttaggcccgtttgtttaagcttttatactctttttttatgtgtctgtttaaactgtttttttttttaataaaaaaacagttttctatttttctaaaaagcaaaatttgtctgattcttaaaaaaaaaaacgtttttaaatttaaacaagtacttaatctaatgagaaaaggttaaaacataaagttgacattatgcccaactgcccaagtattcttgcttggaagccccttattgcagttattttttaaggctttgtttgggagagagattttggaggggaagggaggtaagggaaaggtttatgtagagacatctctttgtttgagagttttaatttttgagggaaaggatttgaggaattttaaaactcctctgaaatcctccaaaaccttaaaactattgtcctccctatttggggggtttttagaaggaaaagtaactaaaattattattataccagttagtgttaataaaattactatcctaccctagtcagtgtgaaatatataatgtattaagtttttaaataaggaaaaaattgtaaaaatttcttattaactctctatttccctctcttaatatatttttaacttccaaacaaggagaaaaaaactttccttattttcttccctttccttccccttcccccctaactcccaaacaaagcctaaagtgattgttatgtatgcattccatgtattttcttataagttgatgtcacctctcattggagttgcatctccattttctcataactttctcgcttcaatttgaataagaagatttttttaaaaaatggataagaagaaagaaaaaaaaatcaaaatgatggtatattttatttaattaaaaaaagttcatctaatttctagtctttttacttcaaaaacaaatcagtaatgtaagtattttaattatcaattttattgttaaaaaatgttgcaaatgtaactatttattattaaatgattattttatacaaatattaatataattaattacaaaactaaaagagatctacataaaaaaatagatatgaacattaaagctcataatataagttttcaattttgatagtaagctttcaagaaacattttctattaaaatcatttttctaatatttattatcctaaaaatatcatgttaccttaaattcatattaacttaaaagttaattctacaaaattacgtttatccaaaatcaattttacaaatagatgtctaaacatgcacttagtaaaaatttgaaccttgattcactactttgtgagaaattatcccttttattacactcaacacagttggtaaataaatctccttttaatcctgtacttctgaatatatatatatatatatatatatagatatatatatattatttgacaaaaaaaaactacttacgttaatattattatttttacaaaaaaaaatcatggccagactataattcagtatttctggcccaaaaggcagtttctaggccgggtcacacattgacactctcaaactcatataagaagtcacaatactctcggaatcaaccattccccttcgccccattatgtattttcagttcctctttcgaagaaaactcaaaccctaaaccctagtttgagtttgcagttcccatttaccctctcatacacacaatgaattttccatctccttaattctacccccaatggaaaccctaattttgttcagcaatcaatccatttagtatgaaatttttactatttcgaaagagattgtagtataagaaactgatgtagtttagtgggcttttttcctttctgatcttgtgagttcattagagttgcgatcaaaattgatttttttttttttttttgcatcttagattgtctgnnnnnngtgcttggttgttgtctgattttgcttttaaaggttttaaatatcggttgtgttacggttttgtagtgtttgttgatatcactgcaaatcgcagacaaatgcagttgatactgtcctgattgggattgtgttgcggccgcggacagttaacaaaaccatgatgttgtggcccaaaccatggttgcagtccctgtttttaaaaccattgataactaacaagttgctatacctgttagattttacaatgagtgtgatagtcttttgcactggcaagttcaatggtttgtgtctctagattatttgaacaatatcttagcttcgtacactaaaattcaagtgcaaagatgttgcatatgatggtttacacttgatctctgaacttcaggtaagttcatatgttgaaaagtacattcactgatgcttctctttgcacttgatcatgaatctgccagaaaaaaaaaaaaaaaaaaaaantgacatattttgaagttattgctgtatggtgtattatggtgtgcatctgcctcatctaagcagatactatgattatagaacgggggaatgattagcattatgtaaaaagtacttttcacatttgtttcataatcaatcgtgcgttgcaactgttttttatttttatttttaaagtgtactgcatacttaagagaagttaaatttggtaagacgcacctcacatttctctacttcagtgttgtagataatggaagatgtttcgtagggcgagagaatacattgtttcatatgatgcatgcttgagtttagagtgggttatgcttcttgtatgcatggatgtagtagtatctttggtcagtactttgtggttcttaacaattgtacttcacattgctggaactttttctttcttgttggtagtgcttgtaccgcattaataatatttatttggttgataaaaaaatgacaaactggattgaacatagattttgtctgaggcatttgaacaacaattttaaatagaaattttatggtgatacatgttaaaataacgaaattaacatcatcgtattggatgataataacatgttaaaatattagagggattgaaatgggtgcaaaattttagaaggaccaattttgaatttcacatattttaaaaagggatcaaaaacatactttatcactaaaatattgttgtatcaatacatcaatgaaaaaacaaaagggatcgacgtcacttgttagctgtcctgcatagattattagataattttaatctaaaagtgactattaattatgtaatgatttttaaaaatgtcaattcagttgaaccaaacgcctcctgttcttaggagaggttgaactaaacgtccatagttgctaggataaaaaagtcaattcaggataaaaacatattaagaaaacactttaaaaaataaaataccaacacaatctgaaccattcattattttaatctaaatcctatggcatgcaactagcgtataattaatattttaaatttttatagctactgttcataatttttgtgctggtctaccggtggaccacctatttcacatgtccagcgtaaaaattgcccattgataaaatttagcttttatctttagaaaacactgtatgtttgatagagtgaaaaaaaaatgaaaaattaaaattaaaatagagtaaaagtgtccacaaaattttagtgttacattttactctttactatcatcttttgcctctaccaaacataccataagcagcatgcacaacaatatttcaaaacctagttattcaaagcccgctacccataatttttcagccaccaatgaatttagttaacttttggcccagattagcaaccaaaaagtttttgcaggaagaacaaaaatacaagggctccttcaaaagaaactaacaagtcttttttgctaaattaaactggtgctgctgtcttaatgttgtatcgatgtcctgcatctgtaaaaatccagcatttcttcctccacaggatgggtctggcctgttataacaaggcaatgcaaaggtgctccaaaatcaaccaagtgcaactgcttcattgttccagctactatcgtctgatcttcactcccaagccgtgcaagcccaacacactcggtatcctcagtatatgctgcaaggcaaagaggggaaaggtacttttaactagatagttatatttctaatgagaaataataggaagtccatttatataaaaactcttactgcagtgaagattggatcctaatgagcaaatactattatggcagtaatggcacaaacatctctgatccacaagcaagacaagggacaaagaaacatgaccacaagaaatacagaaatgactgatctatagctacagctcaaacaatctttgaaaacaaagcaatttaaagatgccaaaaatctagaaccaatgactatatgtctatatccatttaatatatatattaagtagctacaaattgcaaaggacaaatgaatttgggaaagataaccattgatagattgtttgatagtgatggtgaaactttaaaaacaaggaaaacaatcattttgcttgttgttttccaatgaaggaacttccactgtttgatagcacaatatattaaaaaagcacaaaatgagcttattataatgtttccaccaaataattataatccagatcaaatttgaaaggtttatatcttaagaaaattagtacaatcaagaagcaaataatttacacttgaaatttatgcctagagtgatgtaaaagctcgaggaactcaccaggttcttcacgtgcttgcacaatctccaagagctgctcaatggctgtgtttattgtcatatatctgggtggttcataggcttttcttcctctgaaacgaccaaataaaaaagataaataaaaacaaagaatatgcagtatggagaagaacatataactcgaacaattcactgaatgtcatgatagcagtcagaacactagtatgattgccagagaactttagcaacccataacacttaaaaaagtacattagcaacaggaaataaaaaaagggccacttagaaaaccaacctgcacaaagattctagtgtgggctccttcacacgaatatctgtaaccataccaaatcagaaatcatattagctttctcaagaaacaaataggaagaatctctagtacactatcaaagaagaaagttttcctctaaaactgtcatcaacttcagatggtacaatcatttgaacatttatttgaataaagtaacaattttttttgctaactatcttctagatatttatatgacactctaggctttggattccattccaagaagtagaagataataagtttagtaaacaagtttttagttcactggtcatcaaatgcaagaagaagcacttacaacataatcactatttcattatatgacataagcaaagacctgctgcatcagactaatgcatttcatacacaggttccatataagcaaatacctatgttagatttatatttttaatgtatgcacacaaaaaattctaacacaagcaacattttaaagtttaaactacaaataatagagagtttacctaacaagcaaagcgtgtgcagtcccattgatcggtttctttgaatcttttcatagaagctatcaggtctccaagtctctgtaaagaatggtatagaaacagtctccccataacggtaaagctgtagaccacaaactccaatagcattcatcacagatgcattgtgtactactttgacttcaattgccatcttctttgctcgaacaaccaggtcagtgtgagtggtagccctgggaaaaaacatagaatcaaagtcttactaatattatgcatcagcgtttgagtaaagcaatgcaagtgctggatagagaaaagcaaggaagtaggagcatagtaatagcatacccaaaaggatccccaacaacaaggaaagccacatgggcatgatcagcttcagaaagaatttcatcagccttttcttctaccatttctctgtcggcaagaataatgggtttaccatatagtttttcctagtgattgtaaaaagagatgaaaaaagtgtaaatttaagtagaaggaaacaagtataggaagggaaaatatcagaatattttgataagagatgcaagtcatgtagccatacatcataatagagctcaaagaataaaagagggcctccatagaaagatcaaatatgtaaagttatatatggtgattctaattacactaatggtgctgacaagaagcaatgaactataacgaattgagtgattaactaacatatggtgatcctaattacactaatagtgctgacaacaagcaatgatctataccgaattaagtgaataactaacatatggtgatcctaattacactaatagtgctgacaactgagtattgaactataaaaaattaagtgattaactaactaactaactaatagatttttgttctcctaatagaaaggaatggttgatagatagattggtaccaggttggagatgccattggtggagagaccaaaggaaaggagggaagtgtaggcttccatgtaaaccttgctgcacttcttcacagcttccaagcctttgagagtgatgtcttgctcatcacccaaccctaaaccaattatgtacaacattttttttcttttcttctccactctttggtatttttgcttctcaaatcagaataatcaaactccttcgactctaactcaaaggataagagaagaaatcaataattaccaagggagtgaaagtacaacggcgaatggaggtggtggtcggagcacagggcggcggcgggatgggttctctgagcttttttgatttgaagttttgaacaacggtgatacgagtgtgataaatttcagtaattttctttataggttgggtcgggtttccctttctagacctgaggcccaacccaatattagcttttctaaaccaaatccttgtggggaaattacttcctgcaccagattagatgcttaaaagaggtgcagggagaaatattggaggtgcatgaagcaacttcctgtgtggtgtttgtcctttgtgtggctctctctggtttgcaacctttcaagaaaacttccttcacttcactcacagactcacgttttattttccgtaaacttcactttttttatcccaggtgacaaacactaccaaaaatttctctagtgtagttttctttttatatatttaagaaattataagttttgaaagaatatttttctaaaaaaaataaaacaaacaagatgggaagagagaatttcctccattacaattgggttaaattatttatagtttaagtctcaatactacttcctttcatttttatttgtcgtttaaaattgttaagtagaactaaaaaatgtaataaattttcttgattataataaaataattgtgaagttttctatttcattcctttctcttttcactccacaataaatgcatatgtaaattaattaaggaaaataaaataaataaggatataatagataaaagagtaattaatgtgatgttaaactttatcaatgacagataaaaacaaaaaaatcttaaaaaatcccacaaataaaaatgaacggaggaaataattctctggttggacctgttaatagtcctagtatatcattggtgccttgctcagttgtattagggatctcctaattctaccaaatacccaatcaaagtatgttgccaactcaatgtttctttattctcctttagtgattaagtgtgcacgtttcatttcaatggtaacttggtagggcaaaagtcctcaaacattgattagtcggtttgtatgttcctagccttgaatataaatttttttcttggctgaattgtagaaaaacaactttaaaccttgtcacaaagtgatatatgatatagaatatgttctcaaacattaggagagggaccactaaaaggaattcttggatatacataagaggatgatatatactttgttgtattccttttagaagcgaactttagttatattgctttatgattgtacagtgagacatcaccaaaaaatgagatgtgcaatttggttgatgcctttatatgtgcttaaatcagactcagttaaaaaaaaacaatggaagtggttaaaagtttgattagttactctgaagtgttaattaggaaaacgtagaatctggaaatgaaaatggattctccttacccagattaatgagtctacttttgatttagcatatttgattgatgttctaatttcatataatcccagagaggcaaaaaagagcatttctagcaataaaatagaaaagcacaagacacaacgtcaccataaaacatgttcaaatcaacgacaaaaattacatcagctgaaatttatgagctcatgatataaaggtatgatatagaaggaagataaatctataatagtcctccagcagatcatgataaatttgaagattatttatattcatataaaaatttccataaattccatttcttttcttttctgatgagcaaatgaacacacttccttatggaggggagcccagaagatccaacaagtccagtaaaaacatgccaattactggttatgcctatgtttgctgcatacataacttctaccaaacttagtagtagtaacatggatcatgttgtcctataacttgcctcagctatactatgaaatgaatatcatgaaaaaaatacaagaaatgctactacctcaatgtgcaatatgccttaattaatatctgtatggtggtggtattcattccacagcattttatgctggaacctgaaatgcctcctcaatttgtaaagtggaagtgggtaaattcttcaggaggcaacacgtacagcaagattaccacttttagaactgcttctcaaaccaacattccccacaattttccgcattatatcatttctatgttttgtggtttcgccatttttatttctttcattgctttgctgttttgctcctttccaactgtctgttaccctatgtttttgcaaagaaaccttggctccttctttctttccagaagtatgactacttgtcgtagaatcagcaaggcggctatggttggttgatggagcaggagaaatcaaactagctttggatgctttagttttggcacactcttcaattgagataccgtgtggttctcttgctgttacggattcatcggtttctagatcatttcccaccttccatctcgaaggtaatgctgcatcagctccactccctggacattttggtttattatgttcttttttacttctggtgttatttgacacagcctgaggttgagacttgagaagggagaatttgcaaacatcaagtggtttcagtcaaacggagaaaggagaaaaacaataaaaagaatataaaaaaatgcagcactttgattcattgctcacctaaactcttaaacaaaactaggccagtaaatatttagtcaccaggaaggtcccttaaattggacaatggatatgaatatgatacaacaaagacagctcatttgcaatgaatcacatacagaaaacacagctcatacacaaacaaaacaagcggaaaactcagaaagtatgtaccttattcccatgtggttgtgacggtgaaggtgtgcggtaaaatgaaggcattggtgttgctttaaagttgaggctcttccggagttttttaatatcagcttctgtcttttcctacaagaacagaagttgaatgtaatagttttcttcaagctcgataagaaatgcaatgataccaattcatattgatttacattgattctttgaagaaaatatttgaccttatttaggaaaggaatgaagtaatgataccaattgaaatagcaaaagtaatagtaaattgcgtttaaaataaaatacacaggttaacaacctcattggtaacaatcatattagccccttcaattagaatctaacagattccacaccaatgtgtcttgcttcttccgtaacataggcatatagaagcagaaacagaaactcatttgaaacctatgtaactttattcaaagttccattggtttgaaattgaattcaccatgtattcatatcaagagcctgttacctgataatctactatgcttgagctcataaaacccgatgctattattggcagacttacctgtgacattgcttgcttttgattaatctctgattcctttgcatgcattttttcttccagcttcatatagaactgagttgacagaatcaggacaacaaatcaacaattatacattttatatacttttttttaatatgaacagcaatggttctaaaacaatagcattttacttgcctgtttccgcctttccgctcgctcgctacatttgaagttgaaagccgcagccctaggcttaacattggactttgtagaattgaaagcttggttcatcctaaaccttattatgttagtctcagatcagaatgaaagaaaacaaaagattaatccttacatatgtcaacaaacctttctgcttcttgaattcctctcaaagctgtttttgaagcagaaagttgggattctgcaccctttcttacttttgatgcattttcactataaaaaattaaaagcacatttgagtctgtgaatctgaagcgtataatataacaattccagatgagaaccaacaaataccttttgctttcacgaacaagtttctctgctcttttagaaacctgcacatggaggcccataaattaaggtgatagctgaaattcacaagcaagccatatagaagagaaattacactttaaaaaaatgaaaaattaagagtaactatccttccattcttcctaaagtacactgatattcaaattcttacctcgttggtagttttgctagctaaacaagtagttggtgttgcaagttttgatgaattcttttccatatttgttctccttggactctttcctctgggaatcctagcaggatccttagctgatctaggaggggtgcttatctgaacttgaacattgttgacttcagaattccgttgaggcttgatctttctttcctatgcatcaatcaaacacacttatgtcacccaagagtataacaagaaaatttatgtaattgcagactataacaatgtgacagtaaagggaaaccaggttctggttcaatgaaaatataaaactaaagcacaaataatattttgttgtaataaatatgaataatcttaatttacgacattaatagtactttcactataagccattctacatggatctttccatgggtgaaaaaaagcaacttcaagcattggtttgcataccttagtagaaggatttgcagggtcatgcgaaattgtttcctcaacaccctgtgctggtccattcacaggcataatcatgtttgttgatgattcatcagtatttacagtatcatcatcattctttttcacttctataatcaccttgtcatcatctgagagaatattacttgtttcattttcagattgatgatgagctttatccaaagtaatacttttcttaccgggatcctccaaatcattaaaattgtttgcaatctgctgcagacctgaaaatgaatccatcggatattctgtgacggtttcttctctttcatattcatccatcccacattctccatgataatttgaattagcaggaatttcaccaaattgaacataatgatcatcttcaattgtcacaaaatcctcttgggaactttggtccatttcaatataatggtcaccttcatctagctcaaaatccttttgggatatttcatcaaattgaacgtaatggccatcattggactcaaaatcctcttgcctgccaattctctctgagccatcattttcactgattgctctatctgatgatccctcatgacatgtagatggaataaaaccaaatatgcccttcttcttgaaatgagcttcaaaatatgctttcttctcaataactgaacctggttttgaacatttctcaacctcctccaagtacctgttgtgagagaaagaggaccttctttcccaagctaaagtctcattctcaaatctcccaaatgagatagaaccggaatgtatagaatctacctgcattttcggcaagaatcaaagcacagcagtcagagttaaatatcaacactgtttcatctttttagtattaatggtattcaatctagtcaatacgcataatattgagttcctttttcagggtcttttttggaggaatagttacatgtaaagtgaacatttttgtgtggaattataataaatcacataaatgaatatatttctataagatacaaatcgtaaaattagcactgaacaaaatccatgcaaattaggaaaaccctgatgagaatgaatcatcatagtaaaccaaagggaacatcaaataggaatagcataacactgtttaactccagtcaatcttctttaccatgctctacttgttcaactaaattcagaagaagtagttcagatcaagaccattatatgtctgactaagcaacgatcactgacgaagatcactcttctagcaaattattgttgtccatccctatatcattatctatgtttggtataacagtgagttttatattggctgctgagggcctaacaaaaccctcctccttaacccgggtttgagaacggctatcagggctatgaaaaatcatattcatgtaactgacctcatctagtggataaagctttgttgttgttgtatccctatatattatcattaaccacgagaactattcacacagaagcaacctatgttaaatgaaaattacagaaacatataaaaatatactttctaatcttctgccaatgaattgagatggagttatgaaaacggcaatcataattcattaactaaactaaccaaaacaggagtaagcatgattggaagctggaactttgtaactattactgaaaacaatagatccatgttaaaatcaacaagtgtatgaaaaaacaacctgaaagttcatgctgaatgattcttcaacctctccagccataataattcttgcctttttaaaacaccagccagaagcagaaacaactgggccaaatcataaaccttacctaaaagaaaaccaataaaaacaccttcattattgaaaaaccctcatatccaaacaataagaggaagacacacacaaatagaaatccatagtagtaaacaacaaagtccacctaaaaaccactcaaacaagagaaccccatttgagaaaaagtgagaaccatatgtgttaggcacacaaaagagtattaggaaacccaacaagcacagaacagaacagaacccaataatggttccaatttggctttaagtcagatcctaagtttggctcccaagtagtagtttggtactttggttttgcatgacactagagatgatgaatgacgaggatatcactttaaaaagcgtactctaactcagattttcagagttactataaaaggatataaatattataagccataaaataaaaataatcatgtgcaggtggtcttattttgtcttctttggcttagacacgctttagaagctgtgtttcacgctcatgccaatgctactccttctaacggaagagaaagagagagagaagcaagtgtcgacttcggtgctatgttgaacgttgaccctagtaaagtagcagtcaccgtttgatctaagctaaaacattaaatattgctgagatagaacctttctttcccaaacatataaagaaaaaaaaatgttacactacctaagaaaatttaattaatcacttttaattacatcaattttaattttttcaatttattcttaactgaaacctagtatcaaaaataagaaaaaattattaaaactaatattttaattaaataaataatattttagaaatagtaatatttaataaagtaaaattagttaataaatgtatttttcttatatttaagatcataatgaaatattttttttgtaaaataaatatatcataatatcaatattgaatcacttaaataagatagcatattatagtcgtataaatggaaaacaataattataaaaaaatctactaaaatatcaagacaagttcttgtaagaataagtaattaaaaaaatctatagatgacttttatctataatatgataaaaaaataaaggttgtcagtgtgaatcgatatagatggttaatgatcaagaacaaactctccaatttcctctgtgtgagtttgatagataacctttttcaagaaatttttttagagaccaattaagtaataatcctctaaatgagtctttattggccgttccataatattgttgacgctctatccaataatattgaggtgtattccgttctatcacttttttttctcaaaaacaaaaaaaaatgacaaattaagtgatgaagagatatcaattagaaaatgatgttatatgtgtgtgtgtgtgtgtgtgagagagagagagagagagagagagnnnnnnnnnnnnnnnnnnnnnnnnnnnnnnnnnnnnnnnnnnnnnnnnnnnnnnnnnnnnnnnnnnnnnnnnnnnnnnnnnnnnnnnnnnnnnnnnnnnnnnnnnnnnnnnnnnnnnnnnnnnnnnnnnnnnnnnnnnnnnnnnnnnnnnnnnnnnnnnnnnnnnnnnnnnnnnnnnnnnnnnnnnnnnnnnnnnnnnnnnnnnnnnnnnnnnnnnnnnnnnnnnnnnnnnnnnnnnnnnnnnnnnnnnnnnnnnnnnnnnnnnnnnnnnnnnnnnnnnnnnnnnnnnnnnnnnnnnnnnnnnnnnnnnnnnnnnnnnnnnnnnnnnnnnnnnnnnnnnnnnnnnnnnnnnnnnnnnnnnnnnnnnnnnnnnnnnnnnnnnnnnnnnnnnnnnnnnnnnnnnnnnnnnnnnnnnnnnnnnnnnnnnnnnnnnnnnnnnnnnnnnnnnnnnnnnnnnnnnnnnnnnnnnnnnnnnnnnnnnnnnnnnnnnnnnnnnnnnnnnnnnnnnnnnnnnnnnnnnnnnnnnnnnnnnnnnnnnnnnnnnnnnnnnnnnnnnnnnnnnnnnnnnnnnnnnnnnnnnnnnnnnnnnnnnnnnnnnnnnnnnnnnnnnnnnnnnnnnnnnnnnnnnnnnnnnnnnnnnnnnnnnnnnnnnnnnnnnnnnnnnnnnnnnnnnnnnnnnnnnnnnnnnnnnnnnnnnnnnnnnnnnnnnnnnnnnnnnnnnnnnnnnnnnnnnnnnnnnnnnnnnnnnnnnnnnnnnnnnnnnnnnnnnnnnnnnnnnnnnnnnnnnnnnnnnnnnnnnnnnnnnnnnnnnnnnnnnnnnnnnnnnnnnnnnnnnnnnnnnnnnnnnnnnnnnnnnnnnnnnnnnnnnnnnnnnnnnnnnnnnnnnnnnnnnnnnnnnnnnnnnnnnnnnnnnnnnnnnnnnnnnnnnnnnnnnnnnnnnnnnnnnntcgggtgatttttaattatcaacttttagttttagcttaaaaaaaaattgaaaaccaacttttaaaacatagttgtagtttttttcttaaatatgtgttacattttttataaatggctgttttttattttaagtctctaataattatttttgttatatttaatttctgaaatattaaaatttattttaaatatttgtcatttgtttaagggatgaatgacacattgcaaataaatcttaataatatatgttagtagttaatgatatcatattatcatgataaaaatttaacaaaaattttaatttatcagggtttaatgcaataaattttttattagggatctaaaataaaaattatcatttattagagaccaaaagtatatttaatcctttttaaaatttatgtctaagnnnnnnnnnnaggatctaaataaaaattatcatttattagacacaaaagtatatttaatcctttttaaaatttatgtctaagaaatgatagatttatttttaactttatttgttttaaatttacatattttcttctaattataaatttatttgaatttgcaaatacatgtattcttataaacaggatagttgtttagaatcgatataaacgataattcagcacttttttttcttctggaaatggtaattcaccatttctttattagtttgcaactcaattgcgttctctaaattttagtcgtagttttaccaaaaaagaaaaaagaaaaagctagtcgtatagagtttgttgtgatttgcccactccacagccaatcaataaagtgtttttatgagaatacgtttggtacgaaatccacttcaataaatacttttttttccccggataatactagtttggtacgacgtccatttcaaacacaatcattcattgcattttaaatttccatcttcccattgataaaatatttgcaaatgggtatagcaaatatccactaataaaaaagagaaaaaaaattatatactgatattataaaaaaatttatattattatttaattataattcatcatatatattaagattgttaacttttataataattattttaaaaatcatactaacaatgatttataattaaatcacattataaaactattttatactgtgtgtataatcattaaattttattaaaaataaatccgagaagaatatttatgagtacgatggtacttattctgccatgcacctattttatgtatataattaaaatatctaaaatatataaataattatatatttcattaattattaattatatattgtaatttttttaaataatttatatattttgaacttaaagcatgcacttgtgtaaggacttcttaaaatatagtatatgaatgtgttaaaaaatgttaagtttttattagttttttaactgtgtgaatatgtatatatctaattcatgtaattatttattggttgaattattaatttataacattggtggaagcataatgatcacttagatattgtttttttggagaaatatacagttaaatacttttcaaatgtgtggacattgtgtaacattctttccgctgttgctacaacttccatcattgttttaacagtagtttagaaaattggattttaacaatatcttagagaattggagggctcgcaaaatggacaggttggactagtgaggtctagtccataaggccaaacagtgtaatcgagttgatccaggcctatccatattctagtgggactgagatattttatgcccagtctaatcctacattggactacctggtcaatttagactaatttaacaataaataacaaaaaaataaaataaaaatgatactatgttaaaaaaatagaaaaagtaaataaaatgagaatttagaaacaaaaagaattgcatgttgatattatctaatgtcgaaatgagagtatatatggataaactgaggctaggaaatgagagtaagggatttttgggtagagatagacacaatgttgaaattataggaaatatatataaaaatttaaaatcgtctttcttagtataaaatcaaagacgatttatgaacaactgtctttgttagtgtaaaatcaaagacggtttaagaaaaaccatctttgttagcataaaatcaaagacagttttatggaaaacagtctttgttagcataaaatcaaagacggtttaagaaaaatagtttttgttagcgcaaaatgaaagaagttatgaaaatccatcttaaataacttcgacttaatttcaaaaataccattgattttttcctacatcattttaatagacagttttacaaataaccgtcgtcgaaaacttcattccaagacttcatttcaaaccgtcaagtaaagggtagagttcaaaaagggggtacttgtaaaagatactccagcccccaagtaaggtttcggccgtgagcaattcatcttaaggagaaagagaatgactaaagagcaatggtttttacctgaggggttaacccttatttatacaaacctctgtgggccttggatcgtgggcctttgcaaaataaattaccatataggtaatcagtagctaatcaaggcttaggtcacctaaaccttgattattcataaccttctaacatgttgccttttttagggtaaatggtgcatttctacaccgttcagtatgttgtatacttttatggggccataagtgtctctcctaggcatctaaccttaatagccgaatacctagctaaggctcctgaatacttgttcgtcacttctgggtacctaatcagcgtattcaagtgcctaactaagagtgtatgtctcttctagttttggtttaatctgacggtggtttatgaggcccattctaggccaaggaaagaaagtatatatggattaaaaaaaattaaaataacatttctatatacaatttttaaaatattctatttgttatatttaagaattaaatacttaataatagtaacccgccaatcagttaaggctatagcctattacaaattacaattagttatcaatcatattagaaatatgccaatctactgataaaaataacaatctgccaatctgcaatcataattcataagttatataaattataatgttttatagtaactattggaaaaaaattgggggcctaaggctgtgacagaattctcacacgagcacaagtccattttatcaggttcatgtaaaacaaacaaaacatataatttaagattaactgcaaatttgactactttagcctttctggaaaacaaccagagcatataattcttacaccagcacaagtcccaaatgaaatagtatattcaaagtttcaaattgtcagtatttgtagtcgttgagtgaggaatgaggaggtctcgcagtggcacaacggtgtggaggtcttacggtagcagcggcacaactttgaggggttctcatcgtctcgcactctcgcatcatggtggcgcagcgtggcaacggtgaagagatgaaggtctggcgttgcttcgagagtgaggactgggaaggtgtgtgactatgtttgtgggtgttttaggtctaaggacttagggaaatgagttgtaaaatatttttttattataaaaaaagtcttatgatattttattagaatttttaaatgatataaacaaaatttatgatattcaattaagatattttagtataaaatacttatcaaacaatctcattaaaattattgagattttactagactattttctttttttgtttggttatgaaattttcttttctctcatcacacatattatgttctctctttaatattcttcaagatgcatgtgcaatatatgtatctcctattcttttggaataaaaaaatgtaaaatatagtattctcctctacattttttgtttgttttctaaattagtgtttgctttatgtgttaagactaactatgttttctttatactaactatgcatatcgcctgcttgacacaatattttcatgttgtcatccttaatttcgtcattcacataattcaataaccttcctacaaaattttcaccctcaccactcccttctatcccatttaaacatgtcattggatttatcatgacataattgtagtaattaaaaaaaatcaaaaaatcaacctatcatttaaaatctattattcaaatcctaaagtgagaatgagaaaatgttatggtaagaaaggttaatataagatgacataaaactaaaatcaatttagttattaaaaaaatgataaatagtcattttcgtccttgaatgtatagagtactgacaaattcatccctgaaagatgaaaattcaaattttagtccctgaaaatgtaaataatgtgacaaattcatccttctgttcactttcgtctgttaccgttaatgaaaaagcttatgtggcatagagggacgaaaatgtcacaaaaatgattgccaacatagctactaaatagattttggacaaaaatattagtaagttaccattggatgaaaatgtcaataagttatcattggacgaaaatgttagtaattttctattggaccaaaatgtcaataagttaccattagaccaaaatatcagtaattttttattagaccaaaatatcagtaacttttttttggatcaaaatgtcagtacatttccattggaccaaaatgtcattaagtaacccatttgaccaaaatgtcaataatttttcactggatcaaaatgtcagtaattttttgttggaccaaaatatcattacgtttttattagactaatttgtcataccccaaatttcgttttatttaagggtaaaatataatttaaaggtaaatcttccctccttttatttatcgttgcaagcgtaataataatattataataatcactttaaaaaatagaaaaacaaacataagttaaaagaaacataataataaccataatattgattaataatcataatttttctatatgacagacaaattatggttatgattatgtttcttttaacttatgtttgttttcctatttttaagtgattattgtaatgttaatattatgcttgcaacaataaaaaaagtaggaaaagatttacccttaaattatattttacccttaaatgaaacgaaattttgggtatgataaattagacgaatagaaacgtactgacattttggtccaacaaaaaaattactgacattttgatccgatggaaaattactgacagtttggtcgaatgagttacttaatgacattttggttcaatggaaatgtactgacattttggttcaaaaatagtcactgacattttgatccaatgaaaattattgacattttggtccaatggtaacttagtgagattttggtccaatagaaaattactgacattttcgtccaatggtaacttactgacatttttcatccaaaatctattcaacagccatgttagcaattatttttgtgacattttcgtctctatgtgtcatgtaagctctttaattaatggtaacagacataagttaacaaaagaatggatttgttaccctttttacactttcagagactaaaatttgaattttcatctttcaggaaaaaaattgttaacactctacacattcaagaacgaaaatgactatttacccttaaaaaaaactatattagttttatttttttattcaaatatcataatttcttattattttttaccaactcttgtaattttaaatgtgtttttaaaaattcacaaaatccttttaaattttataaatctataaaattctttcaaatcttttaaatttttatgatataaattcattaaaatccaaatttatcataaaaatcttgtaaaaaaatatgataaatcataatactcctacataatttttaaaatttataagacttctttatgttacaataatcttttaaaatcctactttaattcactcccttaggaatattgtattgctgtgtgtgagtgcattcactaacttagttttttttttttaatttctaattaactaatatattattatatttaatataatatttatcggattcaacatggtccgatttaatttggctcatcggattatacaagtcatacaagtgggaccaaaaatgcccgtctcaatttggacggtctttttttcaagtccaacttgaccctacacgtgggtcggtccatcggaccagattcattttattggccctagggaattgtgatttaaagttaagcaatttggccttttgtgggaaataatagttctctatttttattttctgactatatatatattttttttggtgaactgtttggagctttgcacgtaaagcgtggaaatgataagaagcaccaaaaggctttggatattgtccacttttgcacaaatgatgagatttcggatttgagtttgggccaataatgacccacccgtggcttcgggttcataactttttcaaagaaaaataatacttgctagttatttattattaagccatcaaatgaacctttttaattttggctcaataattggtgaaattgatagagacaaacaagcaagctgtccttgcacgtgcattgttcgtgcgtgtctcactgtgggcctatgatattaacaccctttgtttaatctttgcactcctacttattttttaaaaatatattttttattccttaaaaatcttcagattttgaatttggtttctaatgaagtttttcttaacttttcatccctatttattttttcattttgtatttcgccttttctgttatattgattctattaacttgagatatcactatatgatgaaaaacatattgacaattgtgataaaaaaattcaagaaccaaatgacaaattcaaaaatatttcagagatcacctaataaagtcaaagtaatggtagagacaaaacaaatcatgaaccaaaagtcaagaaaacttttatcagaggccaaatactaaattcaaagatttcaagagtctaaaacatatttaagttttatttttgtaattaaaaatagccaacaacaattggttttcgttggggaatttggtttttattttatatgtataccaaatacactagtttctattgtgtatttccattgaaatacaaaacaaaaactaggttttgaaattatgtaattaattgagaaaggaagtgtccacttataaatacaatggaaactagaaactagtttttgtcttatatttaagttgaaatacaaaatggaaattactttctattttgtagttaatttatttattttatttgtgtgtaatgttttttataaataatttaataactttaatgcatttaataacttgttaaataaaatcttaactaatttatttagctttgacacttattttttgtttatttttaataaattcaatagtccaataacatgataaataaaaaggtgaaaaaaatatgaaatgaatcaaaatagatcaatatactcatacaaaataagtcaatataagatgaaatattataaaataagtgaacatgagatttacaataataaagtcaaaacaataactccataacatcactagtggatcttccttttactatgacatgcatatcccgttccaatgctgactgtgtcagtttcttattattcaatttttttattcaaacatgattgtgtgggtgtcaatagaaatttcatggaggtataagcgtcaatgttgttagtaaccatcctcaaatcaagcatgaccttgtagcttataattatttcccaactttatcaacttttagttgttttcatacttttttactatgtaaaaattgattgttcttcatccaaacaaaattaattatcttaaaatcatttgtaagaaaacttatctaaacaaattctgattctaattataatcagttattcatataattgattacaaataaacctaattttgatgttgtttttatgtgaattccatgccaaaatcttacattttaacatgtctttcttggcaaaactcacatttttatgctagtttgtgatagacaagtgccatggagctcatttgaggaaaacatggaaaacttgtgaaatttggagtaaatgaaggactagacaaagcaccacgcccatggtcaactcacaagggttgtgatcatcaagacaatcctagtttgcacaccacaacctcaagatcaacatcacctaacttttccatgatcgtggtcaatgcaagacaatcatggtcttcaagacggccatagcctacacaccatggcctcagaatcagtgtctacaagttttactacggttatggctcatgaactacaattgtggtttgtctacactgccaatcacttaagtaaggtcttataaatagcgggtttagacgaaaacttcacatcttttaccttatttttgagtttttgtagagaacaaagggccttgtgagtattcttagctctagaaggacacgaagatcataattgggagggattttcaccaagtattcttctcttttagtatgtttgtgttctactttgggttttctcgttttctcatgaccatgaacgactagtctccctagttcaagattgtgatgtagtcatattctttgtacccctttctaatttaaatgaaatctttgatattttttagtcaattaaatctcttctaggaggagttataaggttgacttggtggttgaaggaagaagagaaagggagaggtcacaggtttaaatccctcccactaacaaaaactaataaattaacaactaacaatgattttttaaatcttttttatttcttcttgttaatttgggattgaccatatgtgtgtaattgattgacctaggaagagattacttttacttggaaatgggaaaattggggtatgtgcaaaatcacaatcttaggttgtttatcataattgttttcacaccaactttgcaatttgaatcctattcttttaattggacaattaaacacgtctttctccaaattgattcaaaccttaattgcttagttttaaaaattaattgtctggaaattcaaccaatctcttgggtaggatatttggatttttagtccacggtactattgcataaattatacttacctttgtgcaaccccatttttacgcatcaattattgaaacaatttaattttcacaattactcctaatacacctttaattacataaaaaaattaaattaaatgcttatgttcattttttccatgaaattttaattatgaattcttaataatttttaggtaactcactgttaaaaaaatattaacttttgaatggaaacctaacgaaagtacttaatatattgtaaaattgagttaaccctattgcttcttaactcatttgaaaatggttgaactcaaatttaaaatataaaaaatttaaagaactaaaattacaattaaactaaaataaattgtaaaaatacaattttaaaaatattatttttatttacacaaccctaaatgtttcgtgctatataacatgggtacacgaactagttttaaatatttttgagcttgcaccaatttctttgagtggtttgtcagtatatctaataaagttgtaggatgtggtctaactacataaatccaaaatcctttgtaaatgcacatcaccaaagcaggtccaaggcttctagctgggttcatagactctcctaacactggtctgcatgccactatcaaacttaaatgaaaatgatggtataaagttttatactataaacttgtaccaattaaaatccacttagggaccaaataaaatttccattttcatgtgcatgcacacatataacaatttttcaataataaaatttagtgctaaattacccagcaatgaagacgtctactatgactgtcatagcaacaacaatccttcccaattttccaatctatttaagaaaaggaacttgcgttattttcacatatcaaaagcgaaatgaagggatatttgttgtgtttggaaatggatctgaaacatagtttttcactactagttataacttttggaattttctgatcatagatgtgaaccattggttgtaaaacgtgtttccaattaaacacgtaattagagtatctacatatcatgacatttgacaacttttcacctcccttttctcctcaaacacaaccattctttattacatataggggtgaaaatgggctgaattaggtagaatcctacctaagttcgacctggcttgttttatatttttatagttcaagtctgagtctgttgcttgtcacaaacctatttttaggcttgagctcgacttttgtaaaagtccaccagatccgttagccaatttaaaaacatgtttcatattaagaagtgtacaaaatattattttttaaacaaaatcaaagattttcattaaaaataataagacagttttaaatcacaagatgtatgcaaaatttgcctacaaacattacatgtgacatgttaccaaagtcttataagtctcatcaaaagcaaagagtccataatcctattacccatctatacttatacgaattaacctatttcaaatattaattaaaatgattcaaataatcaaactagtaaaataattttgtaatttaaataaaataattataatattatatatcatattaataataatatttttattataaaatattactaaacaggcctacccatcaagcttaatagacttttcttaatgtctgcggcctgacctatttcattaaatagaccttttaaaaagcttgagctagtcagaccttaaacaggctaaaccataggctcacgacagacaatctgtcctacttccactcatagttgcatccaacctcaaaacccctatcccttaatggaacccatatccatcccccaccaccaacaagaaacccatggcggcgagtacttcctctaagttggaataaaaacccataatgtcaagcatatgtggttcttgacacaagaatcaacataagtttccatattgccatgtgaaccgcaacttcgataactcttgagttcagcttgtcgttactggaaatcgtcattaatgcagaactccaaactcaacacgttttagtatcttataatgaaaggttgagtttaggggtggatatggttgtgtttgggaagaagggttattccagggatgaggattgtgggtttggatgcaatgactaatgaatatggttgtgtttgaggaggaaaaagagatgatgggttgaatttgaagaagaagaagaggaggaggaggaggaggaagaggaagccatcaaagaagagggaggaaagggtgaagttggcgaggaaaaaaagaataaaatgaaacgttgaaactagaaatcgtcttcaatagcgacaaagggtggttggaagtaggaatgtgcatataaactagtttgagccgaatcgttttttatctacaccaaaattaattggtttttgaaacgaaatggtttgattaaataaaaccaaactggcttggtttgaaccaaattggttttgaaaccggtttggtttagctaataaccaaattatttttttttcttcctaaaatcaaaattgtttttttaaagaaaaacatagtttgtaaactaattcgaaatcagtttagttcttaaaaccgttttaaaattggtccaaaactcgttcggtctcgaacaagtttttaaaaccaattcagttccgaaccaattttaaaaacaagtttggttttgaactgattttaaaaaccggttctgaaatttggtttaaaaactgaactgtttaaactagttcggaattggttcaagtcgttttttccccgaatcggtgtttacatacccttagttagagggtttgctaagaggggattggggaagtctagtttggaagaatttataataacaagatgaactgttagataagttttttattttgatttttagtctttttcaagaattttgctcattatctaatttcatacaactaattttagtctttttaaagaactttgtccatttttagttattttttttatcttcgttgctcaaaattagttcctaaaaatggataaaaggggcaacaattcaacctcacaaggattaattttgagcaataaaaataaacaagagactaaaaatcaaaatataacataattgaatgaccaaaacttattagattaatctaatagtttaaaattatagtcgagcatgtagatagtgcaccatagtgtcacactacaatgaaataaaggaattaagaaaaactataatataaagtaaaggataaatgactattttgattcttgaatgtgtaaattagtattcatttagtttctgaaagaatgaaaattctaatttagtctataaatatattaaaattacaataattccattatatcattaagtttgtgggaactattttatcattaaactctaatatttaataatcaattcgacaataaataaaattaagagattaatttatcattaaattatacacataacattattattgcattttttataccttcaaagattaaattaaaattttcattttttgactaaattttaactaatttatattcatggatggaaacgatgatgtactcataaagtaaactaacatatatagtataatcacccttctattgtctgtggaaactacagagacaacaaacatcaagagaaattacgtaagtaactcaaaatcaagagattgaatatataattaatcttggatgagaaaatgaaatctgattttacatttttaccagagtttcacacgagacaaactgatcattaataaattcaacaatattcacattaatttctttgaacgaaaaagggatcatgtcagccatgacaaatcaactagtgaaagcaaagctagttgtgaaaagtatcagcccaacgtcacattacacagaagcccacaatgccgatttcataagcccgaaatatgtaaaaaaaaaaaaaaattaaaaaaatgcaacttcctaaaataaaaatgcagcccagatgcatttaataactggtatctaactcagaataaacaatgaatagcccaccatataaaagaacaactagctagatgacctattggccaagcttactccccacgaaatttcataagggttttaatccttttaatttatgaaatttgaacgagtggtggcctgttaaaaaaatatttttactaacttgtcctcttgattagtttaaaaaaacttaacctaattactcaaatgttcaaatattggcaaaaataaggtataaaataataaaatttatttgaaaatcctaaaaataaataaacgggctgatggattgctaatgtggactgattccttttacaacctctttctgcccagcacatttatagcctatttaaaacacatgcaatgttggaccaataaaaacaatgggcaatccaaaacaaactgttgtttcttacacctctaagttgtttccagcatcctatttttggcttccaaaatgataaatccaaaatgtaaaattacatttcggattgattccagattttgcctcctggaatgaccaatctaaaaggtaaaatatatatatatatatatatatatatatatatatatatatatatatatttcaaaaagggtgcaggaagtaatttggaggtgaaggaaactacaacctccaaaccagttcattcatcaataacccatttccggttggtttagatcaacttaacctgttgtccatcttcactcacacaagcagttttagaccttttggttttggaataaaagcctaatttcccgtttctcatttctttccttttttttttcttgttcaaatttattcccacactttatattggttttcagcagttttacactttaagaacacaacagtttttctaagcatgccactggtgccttttccaatagaccgataacaatagcatcaacttattgaagaaaaaaaaatagcatcgaggttgcttctcctactataatataaattgtattggtatcaaaaagaaaaaaaaaatcccgatggtttaatttaaattatgacatgggccttttccaatactattttggtttatagaatgggccttttcgcttccgcagactgggtcagccggtcaggcctatgctagtgtgtgtatatatatattattagtttgttgcatatttagtaatgtttttaaaattaaatttgccaagacacaaatttaaaacttaatgattagtggaactggtatgaataaaacaataataataaaaaaataatacatagtatataaaatcacattcaagaagcataatattatttaccaaaaagtaaaaataaaacatgattatataagtttttaacatttaaagtacacacaaaagttaataatactcaagcctaagtttcagtagcacatactatatgtattgataattacaagtttatatatagaatatgaaagacaatgataaatactttaggttaattttttttaaaataaatcataatggcaatacattaagcatttttcatcaaaccattgtgattcaattttttttatcgaccaatattagtggttagttttgttagaatattagtggaagcaggggcgaatccaaggaggaaaggggcaaaatataatttagataaatttatactaacgaaatttagttaattacttttttcaataaaaaatcccaaataattatgttacaaaattttattaagtaaatttggacaaatgtatgatacaacttaatatttaatgtgtattttaaaagtttataaatggtgtttagagtcacaaatttattcgaagnnnnnnnnnnnnnnnnnnnnnnnnnnnnnnnnnnnnnnnnnnnnnnnnnnnnnnnnnnnnnnnnnnnnnnnnnnnnnnnnnnnnnnnnnnnnnnnnnnnnnnnnnnnnnnnnnttggtatgtctcaaaattcaattaatttcttatttagtattataaacttatcctttaatttatccgtaaaagttgaacacgatgtcagaaagttcataatactcacacactctagtcaaccaattaaactatacccattgattataaacttatcttacatataaaggttaattaatattaaatagtagtaccacttcatcaacaaaaataatagtaccatttaattcctcaaattaattattaccaaatcaatataaaagaaaagataataaatttatttgattgcaaatataaatatttataatctttaaaatattataaaatgaaaaactattataaaagaaaataaataacactcaaatattttgtttaaaaaaggaaaaatataatttctacaatgaagattataaaagaaaaatgatatttgctaaaaaaaataggtattggtcttaaaagagagataaaatgttattattttcacaataaatactataaaagggaagaaatattttgtaagaaaaacaaaataaaatagatagctaatacttgaatatcactattttctacaattaaactcttcaaataaaataattgatttattaaaatattatactttatatatatatatatacacactaaaataatagattaaaaaataccccctaaacccagagccggtcctgaaaattctttggcctggggcgaagtggaaaaaatgggcccctaccacacatttttttttaaatacaaataatattaaaactaagggatcgaaaaaatgggcccttaacacacaaattttttgaaatacaaataatattaaaattaagagatgaaaaaaatgggtccttaacacacaaattttttgaaatacaaataatattaaaatttagggatgaaaaaaatgagcctctaacatacaaaaaatggatccctaacatacaaattttttgaaatacaaataatattaaaattaacggatgaaaaaaatgggcccctaacacataaattttttgaaatacaaatagtattaaaattaagggatgaaaaaaatgggcctctaatacacaaattttttgaaatacaaataatattaaaattaagaaatggaaaaaatggactcctaacacacaaaatggacccctaacacataaaatagactcctaacataggttttatttttattttattttttaataaaaaattttacttaaactaccggcccaaaaatttttgggccctgggcggaggccctgctggccctgccccagggccgggcctgcctaaaccgtatgaacgtccgcctctaagttggagatattcaaatcaacaatctctaagttggagattaatttgcaaattaatcttataatttttttaatcaatttttgaataattttccagttctttaacttatttttcttcatgctattttaattgtttattagaataggagacttgacttaatcaatctgatccaattttaataacacttaattaatactacatcctcataaaagaagacaaagaagagggtgaatatataattttcaaattggtgaatgggcaaattttattattgacatgatccctagctagctagctttaatctttttttttatcattttcattgtccttgtcccgccacccttaaatggtccccaagcacaccacgactccacaccaccccatgcggttcatgtccgtggttcaccctacaaacaccatcacctctctctctctctctcagctttgattggcttttgtttccattcatttactaacttcttctcaagcaccgcttgcttcaacttttttgtttttcttctttggttggtcccaacactctccccaaaaccaaccttgtgtagcagtggtattagtaaaatactattcaacaccctactctactactatcaaaatcctatccggaaaacgatgctacttaaagaatatatacacattttctattctcacctgaataaattctatactcaaaaaaattgttacattacagctggttaaagtacagatttaatgctcaaaatcagcatttttgtgtttcgtattacggatccgaatgcttcatgtactttcattggagccacaccacaatttggtctttggcccctcaatgaatgctccaagatcatgaagccacgcacacgagtgtagcaccatatgttttcccaactacacgccatcattttcttccttctaggcttgtagcatatatacaattgtagtagttccaataatcaattatctgcttcaccatccttctatatgttttggttgaaaaatagcacatatgagaatatggggcatactatgatatatactgtaaataaatttgaaatgtcttatcaaaatttatatgtttggacatatatatcatgattgtaatttggttagggcaccagaaattatatttcctcagctttgtgattcatatcgtcaaatgctatatgaaaaaagttcattaaagttatgaattatatataatcaattacaattatttttttaatccaaaatatatttgatatctctagatagtgaaatagttgatgtatctccacacattcttttatacacataaacttgtgtagattgaatttctaatcatatatttactagacaatcgactacgattatagaaacaattaactatatacaattaattctaagcagtgtggggattacttagtctgtagaagagtgacagtgttatcatcctcactcactcaaactgtcacacagacaatggataggaataaaacatcagcatgtacagtccatctgaccagggttattagtaccttatgagtggttgaaaatgatgtgaatttaagtttgaggtctctgtgttgaattctttttctatatattatattcaaaaggaataagaaaagcaaaggcttaaatgagtaattaaccctgttgagtttgttcaactacattctggcaagcccctaccttagttggatttgaaaccaaacgtctccaatattctatctcatttttaattaatatttctctttctcgttaccttcaatgcatagtatagaatacacacaccactcaatggttggcttacacaaattaaaccttgcgtccacatgaacccacatgagcatggaccgcaaggtatcgcttttgccatgtgtatgctttatgtgcaatgattattacactttactactaactattgacctcttatctgtgtcaaagcaatattgccaacctatatttggtgcatgcatatttgtttttgatatgtatatactcatccatcgacattgaagagtccatatacaaatcgacaaagctagctagggtgggcgagccagagggaaatttctaaaatcttggaccttcacattcatgcaaccaaacatgtataatctcattgtcactttcctaatctcttctctctcaggaccttgcaattaatgactcgcctcaaatggtacccttgttgccttgagtgcggattgaatgagactgatttaccataatgccacttccctcttccactttttcattgagaaattattaggtaatatgaaatcatcatatattgatttataattctaatcaatctttatgacatataactgagattttcaatttataaaaaagagttaataaaacttagtttgtgtaaaaattattattaagattataatagggttggatcaagcaataaaaaaatattcttggacaccttttaaagaaaaaaaaagataattgattgatattgttggtaatattatgtgagaaaaagaataaaagatagaaagagatgaagatttactaggttttgcaaactttggatatccaaaaatagtgactcttctccccatatcctttttgtggatccctatgcctaacgtgggggcttctcttaggtttcatataggcataatatctaaaacaataaatatataggaattgatttctttcttcttcttatttattaggaaaaaaaaatcttttcctgatgaaaatacacgctaatttgaaacccgtaaaaataaactacaaactaaatttgtccctacaattaattagtagcttccgtacaatattattgagaatctagcccaaaattactaagagcatccataatagtggtgaatcattatttgtgctcttaacctatttttgcagactctatcatgccacctaattttaagaactttagccaaattttactccagaacttattttaggaacaaatttagtgcatcatgttatttttaacaaataaaattaactttctattgacaagaacttattcttttgtaagaacggttcttacatttggcaaattctccttcacactccaataatagaatatgcaaaaagtggatttgtctataagaactatggaacgaactctcgatacagatgctctaaaggaaattatctctctcacgcacacttattgggtagcgctacaaaaaatatattgtacatatgattgtttttagctagggttaaaagacatgagtttgagagtaatatgttttggacatttaatagtataacaattcattagttacttttttttcttctgaagagtaatattttttggacgctttaataatataaacaatcccttagttattttttttcttctatttctcccttcttatcacgttatattgtttttcacacttatacttttctttcggtctattagcatggagtgtctattgatcattttccttgattaattatatgaaatgaaattctggttttaactattgtaggtaattaattatatagagaaagtaagataattcagatgatgagaaggacccgtgtcttttgcgaagaatcctgaaaagggcaatgtatcgagaatatatatgctagagctagaaattaatatgacctttataattagaagcaggcaataagatacagacatatatacatactctaaaggatatttcctttgtttgctaattctaacgcgaaagaaaactgaaaatcagaatatgtcacaagtaacactgcattcgtatagaaagtgtctaatgagttgtacctaatgtatatgtttgtttgacattgtcatcatggaaatggttgtccatcaacaagggataatgacttaacttgtgttggcactaatattgtgtacttgtgccgagattagacgaatgatagaggtatcaacaatgataaatcgccatcgtgttctattattagcctcgttgatattaagcatattactcccccttttgtttgcataagtgtccctctaaacatacaagagcttgtagaaaatttcaatgcttaatcgacgaaagactgtgatcattctttgcacactagttgggttataattggatatttaagatgctaattaaaatatgatttgatattttttaggattttttgattttgttttctataaatcccttgacgatggaattaacaagtttaatgaaagggacaagtgaaggaacatcaatatatacccacgaataactactcaactgttaagcaagtttaaatttatggtgatatgaaggcccctacaatttaaagatgcgagcaagctgaaaaatactttgtgaaaatggacagtttttcaaactcctaagctacgattagtcccacgtcggtatcattataaatgtaaaatagaaatatgaaatgatcgtgtaaacaatcatgatgtaaaaaaggaaaagtcttgcgtacccatttctttcattcttatatcaagacaaagaaatattagctttttgtttaaatggtggattgaataattatggcttgccaataattcatcatgaatggtttcttgacttaataaattttagttaatctatgtacttagctccattcttatcgacttgcttgcacgtgtttaagttctaactttgtatggtgcttttcggtaagtgaactctcgttgaaatttgtgttaaatggaacgagtaaatcattccttaccatataaattctctctaacaggtaaaaaacagaacttactaaaattttaaatcttagaatgaaaggaatttaacttttcttctctcactttgcgagtctaaactannnnnnnnnnnnnnnnnnnnnnnnnnnnnnnnnnnnnnnnnnnnnnnnnnnnnnnnnnnnnnnnnnnnnnnnnnnnnnnnnnnnnnnnnnnnnnnnnnnnnnnnnnnnnnnnnnnnnnnnnnnnnnnnnnnnnnnnnnnnnnnnnnnnnnnnnnnnnnnnnnnnnnnnnnnnnnnnnnnnnnnnnnnnnnnnnnnnnnnnnnnnnnnnnnnnnnnnnnnnnnnnnnnnnnnnnnnnnnnnnnnnnnnnnnnnnnnnnnnnnnnnnnnnnnnnnnnnnnnnnnnnnnnnnnnnnnnnnnnnnnnnnnnnnnnnnnnnnnnnnnnnnnnnnnnnnnnnnnnnnnnnnnnnnnnnnnnnnnnnnnnnnnnnnnnnnnnnnnnnnnnnnnnnnnnnnnnnnnnnnnnnnnnnnnnnnnnnnnnnnnnnnnnnnnnnnnnnnnnnnnnnnnnnnnnnnnnnnnnnnnnnnnnnnnnnnnnnnnnnnnnnnnnnnnnnnnnnnnnnnnnnnnnnnnnnnnnnnnnnnnnnnnnnnnnnnnnnnnnnnnnnnnnnnnnnnnnnnnnnnnnnnnnnnnnnnnnnnnnnnnnnnnnnnnnnnnnnnnnnnnnnnnnnnnnnnnnnnnnnnnnnnnnnnnnnnntataggtttattttatattgaaagttttcatgttagatggactatatgttgtttaggaaagcatcatactagtattttttttcttctataagaatcaaataaaagtatagatatttatgataatttacacattttagtcagattcttttgatattaacatttgttttctaatttttataagtcacgtcatcatttaatcgggatagagagtaaaacaaaaaaaaaatataagcaaaacaaaatattttaatatcagataaaaaatacaaattctagaaattaattcttcctatttaatatcatcattcatcatcaggatgcatatttttttacctgctatatatatatatatatatcctaaattattgcatttaactatctttaacaaaccctaaacataattatatttaacatgctctcttaacaaatgccattatgtataataaattttatatcaaacagcagaaagggtcaaaaccgttacgggacgacgtttgagagatctacaaaagcaaagtcactttcttattgaatgctgcgaaagatagacgcatagaaattggatcctacatggtgttaattggtgttgatagccaaaatttaaattaaggaacatatggctgtgaggtatttgaaccggatagagttaaaaccggggtagggtagtaggaccctgaagcacacgtgcgagggtggagcaatggattgatactatatgttttgtacgttgaaaccaatgcaattgaggaagagggccatgtgatggcgtagacacgcattattacaaagtgacttaacttgcgtcttggagtgaggtaacgcaccaacaccaatcagtttctcgttcgagagcatgttggtctttgcgtgaactcgccgtttgtcagctccttcctatattatcaattgcacaaattacgactaaccctaaataaaccctaaagtggtttatgagtatttttggtcgttgctagtacttacataaactactatgaattgagtttggtctccttaaaaacgattccaattcgagttgtgtgaatataaaaaaaatgatgattaaaagatatcgcctaaaaaataatcccgttggatagttaagaaaaaaaattaaaaagaaagtcgtgaattcgattttttttacaaacaaaaaattaataattaacaattaatgtttgtcaataattttttttttacatcaatattacaataacaaaaatattattattttttggaagaaaaaaattgtatgcacttggttcatattttactttatacccacccaatggtttaaattaatactttttgacatatatggcagtaacttcatttaaattatctaaatctttcactgctgagccaattttaatgaatttttaaatcaatattgttgtacacgatgatgatgagatccggtgcgggcctttatattgatccagtgcggagaatagatagtatcatcgaagctttgtcaatttaatataaaaataattcattttgtgatttctaaccaaactaaagtgagtagaggatgaatggttcttctcgatttattaatttatggggatgataaatgggtaactttaacgttgggttgttgtgcgtatgtttccttcaattcctgccaatgaataacgttactaaactgaaattgttgtgcgtatcttcctgcctcatggagtagtatgtgtttaaggtgtttgtttcaaggattcgttttattcttgtacttgaataagattttaattgtagtgtaaaaaaaattatattgtgagcaaataaaaagttatattattcagaagattttgaaataggttatatataaaaagttaacatatttattaatgattaaataaaaatataaaacaaattgtattggtgtgtttaaattaaattctttaaaaattttccattaatttcaacataaaatttttagggataaaatttgatctggtagacaaaaaaaagtctaacatcatttagaaataaaaataaaaataacttataagcatttttctcttaacacatgaaagtgtctctaaggataaaagtatgacaattcatcaaggctaaagtaatcttgaatgcactaacaatgtcagcaaacaaactttgctaaaaatactattgatttctcattcgtctaacttttatcctatttttcttttctttttctttttgtctttaattctcatcacatcatttgtaatatattttatttctctttttaattttttgaggagtaattaaaaatgttcggttattagtcattcaaattgtatgttaagcctaacaggtcaactatttaagtaaacaaatttttttttgaggagtaattaaaaatgttattattatcatatattaaatttgttataatgtatttaaattttatatttatttatcttttttaattttaagtatgttgacctacttaaagagacaaacttaaacttctaaatttattgaaagatgaatttatatcctattcagtagtcgtatcacaaaatatatttttaaataccaatacccctttggtttgatggaaattatagtctacctcttaagcaagttaggttcgagttttgtaaataaaaaaatgtggttaaaagaaagctacttcactaaaaatgaccaactaagtttcttaaagtagattagtgatcaaaaaatcaatatatatatatatatatattttacataaataacatgattacaaaatacaatatgattttaaataaattatcatgtatctcatgctaaaccttaaagaaaaaactgatataatataaacacttaaaaattctaatatacattttcttgcttgacaaaagaataatatattataaatataggagtaccagaagtactcaagatgaatacaataataagctatagcttgctcctaatgtgttttgttagctaatatttacactcacaatgaagaaaataaataccaactaaccaaaataataagaagcttaacatcccttgatagcataacatctatgtccaatccttcctaagtatcccaaaataattacaaatcacatatgctttaactattaattaaatatagtagcaagcaaattaacattctgtggacaataatgaggttatgcatgctcccgatgatactatctattgagtgaaagaataaaacttttgtttttcccactaagccaagaccatgttgtgaaaactattctttgcattaagctttgagcttcaaatactcccaatttaaatatgaactcattcctttatgttgtgataatttgccctatagtatatatccttccttagaagaaaaaaacaaggaggaagggagtaacaacaatttacaaacgagtcaaatagaaaactcgcatctcaaacattttcagtaaatggtaggtgatggcccaaatataatacgacctttctttgttgctacgaacgtgacatcttcttctagaaaaaaaaaacgtggcatcttcagatcttctaatgtttattttatgacttatttaattttaaacacacgtgtcagtattacttaaacatttccagccaaattatgatcattttggtcaatttatttgtcttattttcaacttttccaatacagaatgttgaacttttacaatatacttgactgtgtttattgaatttccttcctctaaaatataaaagaataacataaatattcacattaataaaaaaaattatttgctactattttaatatcttaataatttttgttataattaattaaaattacttattttatcatctactgtgaattttgactttcaaagaacggaatacgtctttaatttatagtaattttacattgcaaaatacgcaacatcactgactgcatggaaatttttggacttctgcatttattattttaaagaaattaagaagtaaagttgttattaaaaatagtannnnnnnnnnaccagaagtactcaagatgaatacaataataagctatagcttgctcctaatgtgttttgttagctaatatttacactcacaatgaagaaaataaataccaactaaccaaaataataagaagcttaacatcccttgatagcataacatctatgtccaatccttcctaagtatcccaaaataattacaaatcacatatgctttaactattaattaaatatagtagcaagcaaattaacattctgtggacaataatgaggttatgcatgctcccgatgatactatctattgagtgaaagaataaaacttttgtttttcccactaagccaagaccatgtnnnnnnnnnnnnnnnnnnnnnnnnnnnnnnnnnnnnnnnnnnnnnnnnnnnnnnnnnnnnnnnnnnnnnnnnnnnnnnnnnnnnnnnnnnnnnnnnnnnnnnnnnnnnnnnnnnnnnnnnnnnnnnnnnnnnnnnnnnnnnnnnnnnnnnnnnnnnnnnnnnnnnnnnnnnnnnnnnnnnnnnnnnnnnnnnnnnnnnnnnnnnnnnnnnnnnnnnnnnnnnnnnnnnnnnnnnnnnnnnnnnnnnnnnnnnnnnnnnnnnnnnnnnnnnnnnnnnnnnnnnnnnnnnnnnnnnnnnnnnnnnnnnnnnnnnnnnnnnnnnnnnnnnnnnnnnnnnnnnnnnnnnnnnnnnnnnnnnnnnnnnnnnnnnnnnntttatcaatttaagattccatttgacaactagttaacagatgtcatttgatagtagaaatattaattttaaattttaaaagaataaacttctataaaactaaaaccaagtaaaattcgttccttttaaagagaaaacaagatatttgacactttgtgtgtaaacacataaagcgttggcgtttacatgcacctctaaaagtgattgatgtgtatatataatgaaatttcacataaccaaacttctcttaagttatggcatttagatatctttatatctttnaaaaactaatattcatgtaaagtaactaaatggaaactaaagtcatatcatcatcatattattattagttgaaaacatacactatgcctcaactaccaatttcttcttttttaaattttaaataaaaacaaaataatcaaatgatataaataactgttatattagaggagttattttttaaataattttttaatttaaaggtgattttttaaattagttaaaagaaaaaatgatttaagaaaatgtgtacaccaaataatagattttattaattgttataaattattattattattattactagttgaaaataggcactttgtgcctcaactattaatttcctttttttaaaaattttaaattaaagataaaaaataatttaaagatataaattggacactttggaggatttattttttctattagctgtttgatttaaaagtgatttttagaattagttaaagaacaaaatggtctacaatatatatatagattaataattatatatatatatatattatcaataagtaataatatcaaatgaatatatgcacaaacaacataataaattatgtgggtcttcctcattaataaaatgcttagttataactcaatattccttatatttcagcttaaaattttagctatcatatactaagaataaaatagtggaagtacaaattttcaatgactttattatttgatcttcatcataaacaccctctcaactttaagggaggcactgcatttttctcattatagacctagtagacgcctagctactatcctttatatgcgccatctaaggtttgggataacgattttttcttttttgttttcttccccccttacaactgtcaccatatgaatataattgaacgacccataggggatgattgaattggacgtgggaatgggatgatatgagtttgaagtgccatcgttttcctggtaaaaaaaaattgagtgctgaccaacccacctccactctcaggctatagcttaaactcttgataaaggtactgactatgagttactagctagttagggttgtgggtacatcactacccaaaaagcacaaataaaagttttgagccatttaactctttctttctttctgttttaataacaaaattaaaggatcttaaagagtctagaagtgtttacaaatcattcaactcttactaaatttgaacgcggagtattgctaaatttccactttcaaattaaggaaagatggagaagtaataaaacaattttcacttatagctatgttgatatgcggatcagatacatttaaatataagtctgattcttatcaactcaataaatttttgtgctcttgattctactttattttttttctatatagaaaaattgtatgtaatttttctttccaacaaccatcattcaacttcagaggaaaagtacataatccccactcagtagaaagacgatgttctgaaagttcaactctcagtcagtctcatggtcccatctttagattttttcacacaaacactaaagaaataacaaatatatacataaacatatgttattattcttaacacaaacatacatttttactatttacaatataaatttgaattaaaagaacccaaatttatattatgatttttccaaaaaaaattaaaacaaaataataaaattagagaataaaaataaaaacccaaatttttaactttgttttaaataaatttattcgtattccttcaactaaaatttacttgtgaataataaaattatatgtttgtgttaataatagtatatgtatgtttacttatatatatatatatatattttatttttttttatgtttgtgtgaaaaaatctccatcttttcccagggtctgcccctctttacgccagaaaaataacgaagatgactttttgctcttttcacttcatcagattaagaaaatactaaacaaataacgtgactaaggaaagacgacaaacgcaaatagttgcgggatccgcggatggtcaaagacaaaagcacccatagtataataataataataaaattgaagtaaacaaattagtgactaaacaaaacttaaaaataattataaaaaaaatacaatcttgcgcttatattccagtttatatttcccctacccaattgctaagctgtctttgttacttgatgacacaaacatgactttttctaattaataaaaatttacaatgcagatacggagggaaccatttctagatttcatggtgagcctttcccctgttttcctctgctatgtctcccatttcatgtacttgttcctctctctcagctgttgaaaactgcgtgtattttggacttttgatagggggattagaattatggggatttgggccaattgggtcttttttttttttcctgaaattccaaaaaaattggaaactctcaatcaaggatctctcctctcttttaaggatatactagtttgtggtttttgttgttcttctccccactcagaaaaaatccatatcccttgttgttaataacagcataatcaatccactgtggtcaccacctggcatgcatgctaactcccaaagtataaaaaggttcaaagggtcattcattcattcgttgatttgtgtcctggtatgttggctactactgcatagatattctacaaaccaagtaatatgtagtagagtagagtaattggtagtgctatcaacatcccaaatataaccctgcaatcaaaatttcaaatttcataaaaaagggtcaatttccaattttgtttcttaagagaaagaaagagaaacaatgtaaactaagaaagtttagttactcacgctgtactaagaatggctgggtggacgttgtactccttagcaaacacaaatggaacaatcccttgtggtagtgcagcctatgttcaaggataggtgcaaatccgtaagctaacactacaaatctttttcttaaaataatatttaacaggtatattgacattaaaatttcatataagatatgttagtaataacccttttgaacacactcaacattatcgattaaaaattaaaattctttaaagttcaaaattttatgaattacactacttatttaattagttgtattagcgatatatattggtacgtaccactctatattagaatgtatagaaccatagtgttcctaaatattcaaaatctctaactttgactgtagcattccaagatattaaattaaagtaatttacacgcgcaagtaaggataaacagtttcctattaatcaaacatgattacatgtcaaggttgattacctgaacaatagctacacgtaagagggtgccacgtaggccaacagcgatggaagctgctgccatgacggcgggacctgtgaggaatcgaacagccatggcaaatgttgcaacagagttcccacatgcaattatcttaggttgaagagccatgaacagacctacaagcaccaaacccacaaaaaggtgaaaaaaaaatataaggcatctaaaatttattggtaagaaatctaaaacagttttaacatacaatttataacaactgatgcatccaagttaactgattgaattaaacctttttaattactcctcaatcatatattagctaaaagggtaaaaggtgaaaaaaaaatataaggcatctaaaatttacagtcttgaaataatgggaaaaaaaatgcttttaggtttgatgtatgaaaagatatttgtagtactgcttgattcgtctaaatcaactacctttgcctaatttgggtccaaaaatggtaacggtggtccccacaaccgccctggaccgcacagcgacgttgttcaaaccagaccccacatgtcggggacattgcactatcacttatgcaatccccatattatcgtcaagtgaacaacatcatctgcttcttgtgttattatgtggtaacaaactacaatatacaatggacggtcatcacttgcttattacttgctttcccccaaatccttacttttcatagattcatcacactatcacattcaatcaagtgccggtgtaccccgttcatttcattgtgattccatttttcaaccaaactataattcaaatattaaaaaatttacaataattgacatatttaatttaatatatattttaaaattaaaagtacaaagaaaaataattgaacaaaactatttaaatgccatcacacatgatgattgcagttactcgatctcttcaatgtacgtttttacactagaaaaggggttatcataaagaaggctgttttagtgaaagagggaaaggaattacaaataaagggagaatgaaattattgggagagcaagaatttggagaaattattacacgaccacttacccaagctgaacatagccattccaagaccagcatcagacagtatggagattgatttctctattattttgggcatttgcacatgccacctgcaatgatcgaattaatttaataatgatatatcagaccttcgtcaacaacaaattataaccaccaccctacacagtaataaacaaaaccctaaaagtcaagaccatgtcaaaaaattggccactatcatcgtcctctcagattgactttaaattttacttacctaaacgccacgagggaccatatgacaccaatgaggctggagtaagtgttggggttgcggataagcttcctccacaccataatcagtatgagacgggtcatcacactcgccggaggcatatgtttcccggcagcggcaacggctgatttcgggtgtagctccgccgttgaacttgaaccaagcttgtttaaaccagcgggtcctgctttctctccctcttcctcaacttgttctccttctttacctggaaatttcaattcttcaccaccaaactctccttctgctgcagcttcatttccaaccaacaatcacccaaatcaaaatcgtttcctcaaaattttaaaaaatggaccaaatttaaactcagttctataagtacttgcagtgttgttaacttgttatccaatcagaaactccaattctaattgttttccgtgttgttctgacaagaaaacagaattaaaagtacttattaaaggaactgcatctaagttttgtaaaatgaagaatctagtacctttgttggtttctccattttgagggtggtcatcagcaaccaacatcctaatttccttggcaccttgttcggagcgaccggattgatcagacgctccgaaatcagccccattaaacacgtggaggccgccagcttcagagacaggcgacgcgctggagctccacacaaacatgtgaagctccttagcatcgtggttggctttgttcccactgttggtaggttgagctacttgaggttgaggaggaggagcaacttgagcttgaatctgtggctgaatctgaggctgaggctgtgtctgcgaattcttgctcacactcttcgttaacccggaagaagagaattccggattgggagccgggtatgcggcgggcactgtctgcacggcggggtagaacccaaaccttggggagctgatggcctgctgctgcgtcgttgcagcagcagacgcacagttctcctcgaagttcgagggacgcggtgtgaccccgcgtgacgtggactgcacggagtacaaatccgcggcaccaaaattagaatgcctcggcgcgtaccccatcatggagtaaaaatctgcgtggttgaagttggagccacgtggcgtggggttacgcgaggagctgaggctgtaaatctccgcgccggtgaggttagagggccgcggagtcatcataaaggaccttctagaagcattcgacttcctaaccgtcacgtgaagcttcccatcatcgccgacttcggcgtccgtttccagaaaatcccttccgtcgagtgaaacgacgtcggaatcaaccttgaaagaaactatagaagcagcggtttctggaaactgctccattataagaagcttcgcgccgcggtactcgaagaggaagaggaggagcgtataccagatgatgcactgcagcaccaccacctgcaccatcaataagccagagtattcgccgtacatggcgatgagcagcgggattcccatcacgagcgtgttcggcaatgtggagagggagaaaatggtaatcatccactccaggctcccgttggcggagaagttcgtccagattgcgagggcgaagagcatgatgatcttctggagcgtgtccgccgcgatgaaccggaagttcatcgcgtacgggttgttcagggagatgaagtgaaacgaaaggagcggaacggcgaagatcgccacgaagcggtttatgccggagcattggtcgggcgagaatatcttccaccaccgcacggagccgtacgctaagatcatcgccacgtacagcggaatcaccgccgacatcaccgtgtagaaatctccccaggttatcatttttccctttctcttaatttctcaaaaaaatggaaaaagctctgctaactacctagttggatggcataagagagaaactgaagagcaaaaacaagggtaaattgggaagaaaatgagaaaatatggaaacgagaaaaccgttacttaactaactggtctgagaagggatatatgtctctctgcaaaggtttatacactgcagtgtttctgaatttgctgatgaagtgttaagagagagagaaagagagagagagagagagagggaatctttggaaggcaagggtttagtttagtttagcttaggctgtacatatatagacctaggggaatagagaatagagtcatatatagaaggagaagaggtggatatatatgtataaaaccatctatttttcctatttatatgcttatggtgagaaaaaagaactataattatatgattacttttatgataatatgtagataaggtttttttctcttttttttttattgttttcttttatttgagtgtcaatgaaaaaggggaaagaggtgaatgagtttaggggaattgggggaccaacagggaacagggtgaagttaggttaggaagtgaccgcctgctgtggttaagttaacccaacatgggttaagataaaggtaaagtttcaatagtgatggaccatgtggtagggaagaatgcgcatggattttcggtgacgtgggagctctaatgcttctttttcccctttccgttttttttttttcttttttcaattttcactcttttttccttttcgtttctcaaatttccttttctcaagttgaaaagcgtgcaggatttgaagagggagcccccggtaaattattggatttgattgcagattttgtgcagagtcaaccgtgacaataatattgaagcttttttttttactgatgatttcagaataatttaccatacgagaaattattgatcacaaagtcaaccaggagactaaaattagtattagtaatgccaaattattgttcgagaaacaaatgtgaacagaaataaaaaaataacttaattaagtgaaagaaattaatgctaacaaataaacaaatannnnnnnnnnnnnnnnnnnnnnnnnnnnnnnttacatgagtgaagtgttttgtacccagaaaaacaagattagatcataaaaaaaaaaaagataagaacatctctaatgataaataggaaatcatactccatgaatcttaagttactttatgtgtctcatacatcacattaatttttaagatctcaacaaattttttactctaacaaatatctcactaagaacttcaattaggtctcnnnnnnnnnntttttgaggagtaattaaaaatgttattattatcatatattaaatttgttataatgtatttaaattttatatttatttatcttttttaattttaagtatgttgacctacttaaagagacaaacttaaacttctaaatttattgaaagatgaatttatatcctattcagtagtcgtatcacaaaatatatttttaaataccaatacccctttggtttgatggaaattatagtctacctcttaagcaagttaggttcgagttttgtaaataaaaaaatgtggttaaaagaaagctacttcactaaaaatgaccaactaagtttcttaaagtagattagtgatcaaaaaatcaatatatatatatatatatattttacataaataacatgattacaaaatacaatatgattttaaataaattatcatgtatctcatgctaaaccttaaagaaaaaactgatataatataaacacttaaaaattctaatatacattttcttgcttgacaaaagaataatatattataaatataggagtaccagaagtactcaagatgaatacaataataagctatagcttgctcctaatgtgttttgttagnnnnnnnnnnaacttcaattaggtctcaaatgaattagtaactaaaatttaacattaaaaaaaaaccttttatgacacttgtatgcaacttaaacactgaaaatcttctctattttatggacaatatatgagaaattggaggtaagtaagtcttcttcttatcacctcacaatagagatagatcttctcacattctcacattctccctatatgtaaattcagtctaacattcacataaatatttgttttaaacgtatgttgagaatgaagtatttcaaaaatagtgacatattttttatatgcatcacatttaatttgtgttttattcattgatgaactttcttttaaatgtgtttcttttacgtttatcaactataacattgtcgtccttcattttttgataaatttaccctccaattaatacctctagagagcatttttattctcttaaatgtcatttaaagctttctttattctataacaaggatgattttatttgaaaaatctctaatggtcatgctatattgtctttctttagtgttaaagttgatggtaattggtttcttctcacaaatagggcatattttatgtcgtcttatacgttgtatttaagcaagtttacatatgatgtaaattaatttaggttaacttagtttttggtcctctaatatattatttagaattaattttatcctctaattcttttttggtttaatttgatcttctaatttttaaaatcgattcaatttggtcttctaatttttttaggttcaatttagtcctctaatttttaatattgattcatttttttgaaatgtgtattttgtggttgtttaaaaccacttagtgacagttttgaaccaccacaaaatgtgatttcttaatatttagactgaatgaccaattttggacctaaaatcatcatagacaacatcacatacttgtgtttcatagtaaagattcatgtgtgctataatatacaattttaaggctcattatgtgcatacttatactttaaccttgacttgtctcaatattgcttaatttatttagtgtatactcaatgttgcttaatgttataggtgcatatgtagaagtaattattgtccaagaaaataggagggaggggagaagatgaagaacttggttgagtctataagaaaacatcatatgtgatctcttgctaatactctcgatttaggcaagaatatcatcatagattctacaattagtaggatcatgtaaagtgatccattttctaggtacccttttgctgctacaagttctagttggaccatgatacataactaagacaatggattaatattatgcaaagttagtttatagtattgcttcgaatagaaattttgtgatgacatatatgatattcttgtttaaatccaaaacatcaaccatagacatcacatatttgatttaacataaaatactcaaggaaaatttaagtctattgtttcatcgagaggttataattctttaattgctgaattgttaactatggaatctaatcaactttaacttaaagcaatgtcacattgttttgctactatatgaaattaatattatcatattgattatgtagagatgtggattgtgtattatcttgagtgacactgctttctgttaaaaaaatgaaaatattttaggaatgaacattaatgggaatacaaatttggatgtaaatatataacttacttgactattctagtcttctaacttataacacatttcttactcaaattgtttagtattgcatcactccgttttgatgcctaattggtcatcaaattttatggtaattcaaacaatagttataatagaattactgacaagagtcttctaacttataacacatgttgttctcaaattgtttagcattgcttcactcccttttgatccctaattggtcgtcaacattttttatcataattcaaacaatacttataataggagaataattaacaaggttccttttgaagagtgataaatattttgaaggttgaggtttctgaaagtattgtcatttaattacatacgttcgtctagtgtctataaaatatttacttgttcataatgaatacacattgaacgtaattttctttgtgtaggtgttgcattattggtagatagaagtgataaaacaaatataagtatacaacttaagaaaatttgtataatcataaattatcttataagcttgatctcctaatactaaatgcagtataacatgttattaataggaaaaattaagggttagaccatgatttattcaaataattttctaaacaatactatttaaattaatttttaacatatttttccttcaatgtctaaaagcaaacctagaacattttataagcaatttaagaacatatggtgttattgtaattaatctaaggtagaatatctcattcctataatgatctcaatttgaagaaacctacccccaaccttggccacacttttcttacttcattcacacaaggccaaatccaaattcaactacaaattttcaaaaaggaaagtaaataaatatatattatgtgcacatgatcaaattccccatgacattatcatggcaatctttaatatatttagctatggatatttaggagtgcaatcaagtttttaagtgtcaaataaataattacaattgaagattcaaattacaatgacaaattgaattcaaagaaaattagatacctaaattaacaactttcacaaattaagcaatatctccttatagacatattacataaacatacctttgcaataatatacaagtcattcttaagtaaaaaactaagttacatgcatgataataacacaaaataataattcaattcacacaatatacccaaaataataacaacctaatttttattctcaacataaaaattgcatgtcnnnnnnnnnnnnnnnnnnnnnnnnnnnnnnnnnnnnnnnnnnnnnnnnnnnnnnnnnnnnnnnnnnnnnncataacatctccctacaaaaatatcataacatgatagcagtaacgggataatcaatattttgaaccctaagtacacacaggggtttgctaacatactctctattagagtattttagcaacctacgccgaattatttagagcaaaaattaaactacttattttgtgataataaatttatgataatttaatatttatatttttaaaactcatttatttctctctcttactcattctctctcggagaatgagtggggaagagaaataaatgagtttctaaaatataaagaataaattatcatattatccctaaataaatttattatcacaaaataagtagtttaatttttgctctaaataattcagcgtaggttgctaaaatactctaacataagagtatgtatgttaacaaatcatatatatatatatatatatatatatatatatatatatataaagacacttaaaattaaacacattcaaaattaggattcacaatagtttctcaaaacaacatatcaccatattcaaaatagaaaaatactcattgtttgcatgtctaaaacaacaaacaattaatgaaatcaaataaaaaagattaagcctctatggcttaaaggctagagtcaaataacaaattcaatgcaaaacatctttagctataaggccaagcattgcatcgtcatcctcatcacttgcactgttgtagatttgtttttcctcctcttgacttccaatttcatcaccaataggcctagaactaaaagttacaattgcatttttagttcttgtatgttgtctagtgtatgtattaagcttcccagccccaattagaactaccacatttccccaagttaaatcatcgaactataattcatattcttggacaacttcttcatcttcatttgtcatttctcccaacaaccattaattactctcatcaacctcattcaagacaatggaatcttccgcaacttcacaatcaaaacactccttaagtgattgattatatttgatatataccaaacactactagaaaaaagcttttgaacatcaatttttgaaaaaaatcgataaattgattttgttaacatcggtttttttaatatcgatgttgttgtgtcgatgttaacatcaatttttaaaaaaccgatgttgtgttgatgttaagttaacaagcataagacaacattagtttttatggaaaccgatgttgtgttttttcgaagcacaacactccttcattttcccttatttcattgtatttgtgttcttagtgttttgttgccaaagttccaaagttcaaaccaacccaatgctctctcgctctctcaaaccttgtcacatactctcctccctctcccaaccaaaacgctttccccgtcatctccaacctccacaccgacgaccgggatactgctcaccatgttcaatcgcttcggctcgttacccaagctgctgcactcgctcttcctctgggcccagacacggcccgtcttcatgcccgaccacaagctctttgaagccatagtcaacgagctcgtgagggcgatgaagttcgacgtcgagtggaaacttgttctccatcacgctcgagaagaagaaaaagaaatgttggcttccattggaacctttgctatcatgattcggtgctacgctcgtgcaggtaaaggaaaatggtttgggattttgggtttcaatttgttcaatttgagtctggtagtttcaatttgggatttagggtttctaattttttcttttttttttgcttcataatttttcattcaatgcttcgatcctgtgaatttaattgttattttcgacaatatttcttgtcacagagcaactattgaattctatttctgttcatgttgttgggactaaggttcatttactaataatggctctaatgaatggacctaagcttcggtcctaggcaagtagcaacaaagatgcttctctgtcacatgttcaattattaattcatatgacttgcgctttattttgttgaatatatcagttccgtacgtgtttctcttgttgtataacatttgcttcaattgttgatctgtttctcaatctcgaatctctataaagaaaaaacaaatcttaaccatatactttgtgggtattgaaatagatagatcatttgcagtttttaagaaactaataaatatttaccttattagttagattatcgcttttttctttctttatagttttagttaggtaatgtcatttttatttaatctttcatattgtattgtatattttttttcttctaaattttatttttaaattttttttgctataaatattaatttaatttccatatgcttttttctatgaatattaattgtatttgtcttcatcatagaagtcccagtggtttataatacttgttttccttatcatttcctatgcatgaagtttactctataagtttaagttaaaatagtggaggtaattaaaatattgcagcttgtgtgaatgagtacttttatcgagaaattgaaggctatggagatatgaaattgtctgaggatccaatatacaaaggttacaaggttgttttggattcaaaatccattgatgaaacattggtaaggcatggagtgagtcgtatattaattagttcattttaatacattcattctcttggaattgaatggaacaagtgatcttctattttaaattgggcaggcattgcatgtaagttgggagccaaggcattaaaggaactgtcacaggtttccatggcagcaatatgtaaaagttggagctgtacttcgtcaatttggttatactgtggtagccctacatggctgcttgagaacaaaaattcatgtaatgcttcataaaatttatcattatttgaacattcagtaattcttcaagatttttatttataatcccactaatgctatgatttgaaaatcttttttcaaacacctagatctgttagagccatgttcaaggacccgtgcattcagcttgcagcagaggtatcgaaagtattgatagaactttccaacagcataaggaatcactgcattgctctctataaatactctgctcatctgcatgaagtcttgcaggacctcaacactgccataaaacctcaacctcgcctcttctggccccaaatgacaagcttgtgattgtcatgatgacataactcttaaactaaatttgttattgcaagagctcaagaaaggtagaattactgattgtagttatacttttgatttataaaaagtgatatttaggtaattattttattatttgttgttctatattacttattactcttggtgcaataattattttataattatttgttttgcccaaaacctgatgatgactgcaaaggttgtctgacgcatcaagttcaatgttgaaccattagaatttggagtagtgcttctggaaagtcttagtgcaatagtcaagctatatttctaaagggtatgtatactttgtcattaatgaattacagtttatgacaatgtttaattgagtttgtaagttttgtatttatgaaagttaaattaattgatgcagaatttagaagtcgtgttagatacataaatgtcttagatccatccattatttgttactatatttcagaaatacttgatgttcgacgtggttggcttctatttatggtacttgctccttattttcatttagaggcttttgtcatgcaattggccttgtatatttattttttgtatgtatgtctggaaaggtatttcataattcatatatctgatgtaaatttgttgatgtacttggacttaatttaaatcctttgttgcttatcttgttgaattttatcccttactatgtgggcaaaagtttgatggaagattcttggctcctctactttgcacttcatgacatactattggtttaagtccatgtattttttttcttcaaaagttgctccctatcccaggtttccttggaaaattgtgcaagtgaggacttcattcatatgtcagttgcaagatgctgggaactagtcagagagaaagtgaatcaagaaattgcaaagcaacataagttgggaagaaagggtgcttctcctctaattgtcattttattttctctgttaatatgtccccattaaattttggcaatgttaaaacatgtctttgtacttttatataacctctgttcttggcatgcctttggcaggaactaggtctgcttgtttaaatgttgctacgttagcccatgccaatgctgggatccctatgtgtgatcttgtaaattcctgcagtgcttgataccttagtagcacccctctacttggtatatatatgtttttgcttgaaattttaactggctaaattaggggaggtcttttatttcagtaaactttttatactcaacctgtcataattaataaaagttgttgaatgaatatgaatagatttgaactatgtagaagacaatgttagagggtctgatgtaactctaggaattctgccgaagttggataaagtgacactttttcaggttaatttttgtgtcttattttctccatatttcctttgagaatgagaaccttgaaatttttaataagaaattcaccactgtatcttcaggttaatttttgtgtcttattttcattataagaaaaaatttcaattcttttcacttttgttctatcaccaatgcaagagccattacagaggatgtacactatcttgatagaattgcctataacttggatttcaatttctcttaaataaattagaattaaagatcttttgaattcatgtattgctatttttactattggttgcatatctttggattggtcagatttgcatttaatgttacttgttcaatgttgtgatattatttatatttaatttataatatagagttgtttttttttatagaaccatgtgcatgaaatatcagttaatataaagagtcggataatcaaactttgttcgtctaacatatactttatgaccatgaatgacaggtatttgcatatgagcttagaattcctttccttgagacaagtgttacagactcaatcaatgtggatcatgctttcttaaccatggctgtctggcataagtgagaatgatgtgacatgttttgttgagtttttgtctgcttctccacccttaaagagtctaattaataaagatgatagtacttttcatggtgagaattgctggcttatataaaaatatatatatatatatatatatattttcattttcaattatatatataattatacatgaaagtaattatatatatatatatatttcaggaatttgatatgacatacgtgtataaatttatttggtaatttaggcttcaatatgccaatccatgtactatagtaagtcctcttccattttctctcattgccttcaacatttgatcattagtacttctatttccccatcaatgcaaattttgttctcgtaattttatattctttctttgttgaattaaacttttccttatggttctggtataaatgagctccgagcctccttcaattgttgtagtgctagaaaggcaacatcattttcatttactaatatatatatatatatatatatatatatggatttcaagatgaaaattatttgtttattgtagaatgaattggcctcccatagaacagatgtagggaatatatcttcttgtttccttgtttctttaacttgtaataacttctaccatcataatccaatgataaataacaaccttctgaaatcgagtttccttcatgttaatttatatacaagtaattatatgtcctggtataaaaattaaaagcttataacatattttcaacaaaattatcagaaaataatatagtataactattgttgttgcagagctattggaatatgagcttatttcctttttctttgttttcttattgttttttgttttgcagatatatccacatggatgacttgatattgttcattcaagtgaagccatgtacaaatgagcaaggaatcaaggcttaagtgttttgtgttttcaacatactcaaggataaaagttccaagaaagcttgaagaccaatttgattaatgtaaaagggagtttatgatctgataatccaattgagcatatcatgcatgaatcattcatctaggattgttagatcaaaggtcttagtaaaagcaattaactagaaatgcatttaaacaagcaaagtttttggaaaaatgaagttctactgtagtaatcgattacataagtattggaatcgattattttgttcttcgtgccttttagaaaacaaatcaagaacatagtaattgattacatatcgaattaatcaattacataggccaaaataggaaaatcatattgactgtcttaatagattacatatggtcataatcgattatatccgtgcctatggtaaacatgttctattaaggtaatcgattacatatcgttttaatcgattatgtagttcatttgaaaatatgtgtctgactgtcttaatcgattgccatagtcagtaatcaattaatcaatgcatttagaaaaaaacatgtttgtctggcttaatcgattacttcacggaataatcgattatattgttcatagcctaaactcagaaccaattaggagcactttaatcgattacattcttggattaatcaattacatatgcaaaataatcgattacatgagcgtgtttaatcgattattttcagttagaaagctgttataaatagaacacactgctctgtgttttttaaataacttgagaatttcgaaatctgagtattcacaagctttcattagtgactttctgagtttcaaaaggcatctgggcttcacaaattcttatgggtttttgattcaaagcagtgaagcatcattgttcatcaaagcataaggagaggaatgcattgagtttgtaatctgtcattcaacctgttgaatcattcatttgcatgagttcttggattatcaggtgatatctttccttattctttgaaggtgtaaaactgttatttgattttttgtaaagattagtctattgtaaatgggtttcttacatgtttagagatagtgtttctctaaggatagctgagtagtgttctcagtgtgggttttggtctctaagggtctaatagtattttagacttctgaactttatctagagttgataaagagagacttgtaattgcttgtaagaatatttttgcaatagtggaactctactctagtgttgagtggaagaactggatgtagtttcatagtgtttgaagtgaaccagtataaaaatctgtggctaatctttcttctcacctattcatctcttaattgctttgtttgtgaatcaatctcattgcacataaagttatactctgttttctattcttcttgaaaaagaaatttgatggaatattgattcttggttttgaaataatttttaaagtgataaagatcctgtggtaactctgattttaaatttttaatttaccaagattcaaccaattcaccccccctcttggttgtgttgaagtattctattcattttcagatatggtttatatgagaagaagctacaaaaacaatgaatctctttgaagtagtgtttgaagttaggggaattagcaaactgaaacactctttattgtctttgagacatactttcgcattttaaagcatacaatgcagcctataagtgccacgtgtgtttttatatcacgcatattaccatatcaagggaaacaatagtgttcttggttcataaaacttgtttttcattgaattagatttttatattttgttgtgttaatatttcttggatagtttttgtttgtgtgtaactaagtaacttttgagtgagcattcatcactatctatcatgattgttgataattttccctgactttctggacaaatttttattcttctcaatttactcagtttgcactattatggctaccaacttgttcatagaagtgcattaaaatttttatttaagtttttaataagtcttttaaaagtacagggagagaaataaagagcatataccatatttttttaaaaaaataacattatacatcagttatgcattaaacgatgtataaagagattatacaacatcggttctgccaaaaatcgatgtgagaaagacacttctaaatcaattttaaacaaaaccgatgttgtaagtactaatcaacatcggttttgaaaaaatcgatataaaaatgtattttcacatcgttgtttgacataaccggtcgtgtgcattaaacaacattggttttttttactaaaaaatgatgttgatatacataaaacaaaatcaattttactaaaaacaatgttaaatcatgcacatcaacatcggtttttactaaaaaccgatgttgtttcataatttaacatcgatttatagtaaaatcgatgttgtttaatgcatattttacattttgtttcgcttatttttcattaaacaacattgatttttcttaaaaaccaatgttgtataattttattaacatcgatttttgaaaatcgatgttaacgttgatacttttaacgttagtggtttcaacatcaatttttttaaccgatgttgaaagcccaaaaaaatcgatgttaaaagcctattttttagtagtgaaagtttgcaacctttgattcttgagtctacttctctttttaggatgaacttattttatatataaagataaaaaaatagtttcactttttcattcttaattaaactctttaaaatgaagtaatttggtaaattacttacatgctcaaagatgctccaattcctctcacatctcgataaactatatgctaagcttagcaatcctttgtaagtttggagccattgatccaaaattgttccaccattctaacaactaattaaaatttataccattacacaactgcaaaaatgattatacaacaataaatacacttatatgacaatatttaataaaaaaatctcataccacaatgatttttttttgctttgtcttattgacatgggataacccatgtggtgaccagatcttctataaacaaatagttaagtatttgcatcattgtctccctcttgagttgcaaatagccctaatttgaacacttatacaacttctttgtcacttttggatcattttctagacgtggatttccataaaaatattgatgattgagataatgacttgttgcatgcaatgaatgatgaagttggctctcacatcttttattaattatgtcaagcacctccatgtacttctctttgtttccattgaatgtattttcgatagttttttttggccctatccatagcctcatatatatatatatatatatatatatatatatatatatagcccataacaggtttcttctcattatccactagtctcaaaacttcaacaagcgggctcatacccttgagggtataaatcacatcaagccaaaaactaggcatgaacactatgttagttgcttttttttttcttttagtttccttggctacctttgacttcaaccaatcatcaaaagtaaaatccttcaaaggtttttattttttttttattatcatgcaacctttataatgtcaagaagtttgtggcaaacattcgaccaaaggcacggcctgtttaacaacaacaagaataaggacaattcttctctctatacgaaatttctgatacgcgaaatctggccaaaaaaatgaaatttgtgagagctcattccttttttgaagcaatgaatgatttttttacgacgataggataccaccggatgcagtttttgttatgaactgacaagatctacccaaatgactcctagagtgaacgacttcctctggctttgtcccggcctactcattgtgatgcaaagaaagattgtcttcactttcaagctggaaaacctggaatagaacgtaagttgacaacctacctaacgaattcagttatgttgttgaacctccccatagtattcaataccaatgagtggttataaatgtagaccacaagactaatccccttttggatagtttttttcactctcgttttcttgtcaatgtattttaacattaaatcaagacaatgggaaacacatggtgtccaaaataaatgtggtctcttggcttccaacaacttacctacaaaaaaattcataaactaaaattagaaataatcttaataatttagaatctattgttgttgtccaacaaggttaaaatttggaatttcaacattcaaggcaatcttaacacttttaaaatttagaatgtcaagattcttaccaaccaattataaagtttctcccatttttagtaaccacttgaacaacattgctctcttcaacaaaactatccaacaactaaatggaggaggtttcactattgttgatatcttaaagactaatccatttccaagccatgtccaagttaggtaaaataggtttcactaatccactggaggagtttattggtgattgaatgggctgagaggatggatgaacaagttcagcgggtgaagctataattgctaaagttcaaaggaaataagaaggttgaaagaagagaaaaaaagaagaaaaaggttgttgaaggaatgttgcaggttgtcgaaatagtcaccgatagtgttgtcagaagaaggttgaaggtcgtgccaagatagggttgagaaagggcgagagtaatgtgcgggaccaaggctggatgtcgaattggaaaggcgggtttgtttgggtataaaatgtggggtttttcctttaagtaaaacattttgtttgacttgtaaaaaccttatatggagcaacacatttcacttatattttttcttaaaaaaaacctagtgaaatgatacatacaagtcgtcttcttccctaaacctaagatgtcgttgttgcgattgcagaggctgtgaaattccacgatatggtgtgaatagcggcgcgtcaactgcaggaccaaggtgcgatgcgacgaaaggttcgccttgctatgcatctttgcaaaagtgacattcttgactactctggatacaacttgtttagaaggttacaatacatttttgggaaagaaaggacaactagttattttgttaccatgcttaactttcatatcctcaattgtgaattgatttttgtatctttaatttttttaatctgtcaaagttagaagtgacttaatataaaaaaatacttgaaactatttttttgatataaaattgtagtgaaacctgaaggagaactaaaaatagttcagattgaatgaattaatatataaaaaaaattgggttctcattgcttctattttcccttacaatttccttaaatagactaaaagttctaaacgttgaaaataatgtttttacgaaaaaaattcaaaacacattattactttaggcattgctttctcttttaaacnnnnnnnnnnnnnnnnnnnnnnnnnnnnnnnnnnnnnnnnnnnnnnnnnnnnnnnnnnnnnnnnnnnnnnnnnnnnnnnnnnnnnnnnnnnnnnnnnnnnnnnnnnnnnnnnnnnnnnnnnnnnnnnnnnnnnnnnnnnnnnnnnnnnnnnnnnnnnnnnnnnnnnnnnnnnnnnnnnnnnnnnnnnnnnnnnnnnnnnnnnnnnnnnnnnnnnnnnnnnnnnnnnnnnnnnnnnnnnnnnnnnnnnnnnnnnnnnnnnnnnnnnnnnnnnnnnnnnnnnnnnnnnnnnnnnnnnnnnnnnnnnnnnnnnnnnnnnnnnnnnnnnnnnnnnnnnnnnnnnnnnnnnnnnnnnnnnnnnnnnnnnnnnnnnnnnnnnnnnnnnnnnnnnnnnnnnnnnnnnnnnnnnnnnnnnnnnnnnnnnnnnnnnnnnnnnnnnnnnnnnnnnnnnnnnnnnnnnnnnnnnnnnnnnnnnnnnnnnnnnnnnnnnnnnnnnnnnnnnnnnnnnnnnnnnnnnnnnnnnnnnnnnnnnnnnnnnnnnnnnnnnnnnnnnnnnnnnnnnnnnnnnnnnnnnnnnnnnnnnnnnnnnnnnnnnnnnnnnnnnnnnnnnnnnnnnnnnnnnnnnnnnnnnnnnnnnnnnnnnnnnnnnnnnnnnnnnnnnnnnnnnnnnnnnnnnnnnnnnnnnnnnnnnnnnnnnnnnnnnnnnnnnnnnnnnnnnnnnnnnnnnnnnnnnnnnnnnnnnnnnnnnnnnnnnnnnnnnnnnnnnnnnnnnnnnnnnnnnnnnnnnnnnnnnnnnnnnnnnnnnnnnnnnnnnnnnnnnnnnnnnnnnnnnnnnnnnnnnnnnnnnnnnnnnnnnnnnnnnnnnnnnnnnnnnnnnnnnnnnnnnnnnnnnnnnnnnnnnnnnnnnnnnnnnnnnnnnnnnnnnnnnnnnnnnnnnnnnnnnnnnnnnnnnnnnnnnnnnnnnnnnnnnnnnnnnnnnnnnnnnnnnnnnnnnnnnnnnnnnnnnnnnnnnnnnnnnnnnnnnnnnnnnnnnnnnnnnnnnnnnnnnnnnnnnnnnnnnnnnnnnnnnnnnnnnnnnnnnnnnnnnnnnnnnnnnnnnnnnnnnnnnnnnnnnnnnnnnnnnnnnnnnnnnnnnnnnnnnnnnnnnnnnnnnnnnnnnnnnnnnnnnnnnnnnnnnnnnnnnnnnnnnnnnnnnnnnnncttatttttaaacaacttgtataagcaattacattatagatgttttagtgtgtttctttataaagataaagatactcacctattttttgtttttaaagaaagtatattaaacaagtaataatttaaattttctttaaattaaacctaaatttatgtataacctatcaacatacttttttctaaaacaacggactatatttcaatatttagaattgctaacacacactcatttgtttcctagaattaatgagtataataataagttataattttagttatcttaaaatacatttaagattaattaatttggtgacatataaggtgaattggatgattgagggagaaggaaagaaaaaaaaatagttgagtttgatctccttgcccataaaataaatggtaacatattcctcttaaataaataaatggaccaatgtgaacaaattttatcatagaatagttttcatttttgggttaaagatcatgggtgtcacccaattttatgggtcaaagacaaatctcacctgtatgacagttgattaccgtaaaaatcaaacacaagttattcagctaaataaattatagatcttctcactcataaatgcagcggtgtcttatacctgttatgttagaatataattttttttttatattaggaatataagtatataatttgatagttcttttattaaatttttatattaaaacatttaataagtaatattaaatattattaaattaccaactccaaaataaatgttctacaccgaaacagtattcttcaatttgtctccctagactatgaagtatttagaataacatttttttttatagaaatgatttagaattacatctatgaaacttaggttatatttactactaatttcatttaccttctagtttttttattagataaaaaacttgtttaattattcaatatataagttatttttaagtagttttcctcattttttttaaatactatttgaagtaatttttttaaatgctaatttattacttctaatttttatattttattcttaaaatatttattcaatttctttagtacctttttttaatatattatttatatcattttacatttttcaattactttaacaatctttaaaaaataaccttagttaattttttcttttaaaacttaatattgtattctaataaattatttttaatttatgaaaagaacaatttttgtgtagattttcttgctaaatcaagagtcagagacgccattcatccaataaccatatatttgaggatcttaactcggcctttgccattcagcaatttcttctagtagggaggggtctattgtgcatgtctagctgtttagtttattaatttttagatgtatgtactttaaaaaaatcagtttcttcataattcatgcataaagtttattaagatagtacttttgagtttattttgataaattctaagatcaattttatagtataatttttgtacgaatatattaatctgtatttaattatagtattgattttttttacaaacaaattattgatatcttaacacttgtgcatattataaaagttttagaccataatttaaacacacaacctatactaattaattatatattataacaaaaagcttggttatatatacatttcctagtttcgagatttataataaattattattatataataaaatgtgcctttaatgaaaagaaaagtttttcatttttttatgaaattagttattaattttattagaatgttaatgagagatatttgaatatataatctctctttccatttttttatctactaaatcaaccttacaattcttataaatttttcattctctaaacctaaccaatgccccaacaacaaaaatctaacccatgacatttatgtcattatattattaatgcaaactatatcaatagaccatgtcattaactaatatatttatttgagatcctgactaatcattgttagtaagatctcttcactactacaaaatgtgtaatccacgacgcgcaatctacgtcggttgttaaataaccgacttcgtatgtgaaccagtggcatttttgtaattaattgaacaatactccaaaaaccaggtcggtctgttgtagcccgtcgttgtttaccattattcaaagtcgatttttataagaaccgactttgatgctttgtaaaaatttaaaaacaaatttacagatatttttcttttatataaccctgcacaaaaaaagcataacctaggtcacagctcccttgcgactttgagtctcagtgctccccgcgccgacattgttgtccgccactccgccgcgccatcgtcaaactctcgtggcctcgtcgccagttggaccggtaatgccgcaacgtcgtgagtcgcctccaaagctaggtaagtaactctccaatgctagtgttgccttctcttctactctctccagcttccttccttttttttttttgttttttcattctattttccgcaactgctctgctcttctgggtcgctgaaacaatgcccgagaatggatcaatttttttttaggttttgggggttgtatccgagatttcgagataggtccagtcatgttgatttcctatttgtggtgctttatgctttaatatctcattgtcttcaacatgctaaatgtggaaacttaaaggttgcaactgatatttttgatgattcggataagggggatgtggttgcctggtctgcgctcattgctgggtatgcccaaagaggggatttgagtgtcgcgcggaaactctttgatgaaatgcccaagagagatttggtgtcatggaatgtgatgatcacggtgtacacgaagcatggggagatggagagtgctaggaggctttttgatgaggctcctatgaaggatattgttagttggaatgcattgattggtggttatgtgctttgcaacttgaaccgggaggcattggagttgtttgatgagatgtgtggagttggggaatgccctgatgaggtgacaatgttgagtttgttgtcagcttgtgctgatttgggagatttggagatgaagatccattgcctccatataacatgatccggaatgttatggacatgagtgctaattttgggggtttaaatgtcgtgctgctggagtagaaaaaaatcagtgtgggtcatgaatgttgttcctgcaagggcttctaatgcacttcctcttatactagatagaggttttgctggtgtcacgcatgactggtaagttgctaatgttgttgtgttgctatgtctctaggtcaaaactggcatgctgccctctcttaatatagtcaaggtcctttctcagacccttaggaaatttcccatcaaaggtattcacttgtacaaaaatcaattctgtatgtgctcctcaaaattatttcaaaattaaggtttattaataaaactgtagaaaattggctccacttatttattggattctgagtgcagggaggagctgctggggctcccatgactttttctgtatgtgctcctcaagtcgcatttgactttttctttgtatgtattggcttagtttattttatcaatttgggaccacttgggcccacaaattgtgacctttgtctctattctggcaaaaacaatgcatggaacttatattgtttgataaatcaagaaactctgcagtgaaaatctgttatgctttttctttcatttttagagctgaaattgaaggatactattagtatttaatataataaaggaacatattttcatttacactaacctgtcacgtataggatatattcactccatgaattttccaatcttagtttactatgctttgtatgttatttagttatttatactttgtgttagtaatatactgtcatgacagacttaagtgttaagtactaaattttagtgaatttgagtgcttctaagttgcttaccttgagtgtttagtactgaatccattgttatattataacgactcattctttgctttgttgtatagtgctttcacaacactctctctttccgtgtaataagcccatcaatggtctcttaacactgttgaaatttgacccatgcaggtacctctcttgatttcattcaattcttagagcaattacactgatgaagtaactgctggttataaaatattttcactttgggcatccaaagttgactttagaggtaattttatgagcattttgattttgatacttactatgcattttctgttggttactgctaaagattcagagattttagagaaggaattatatcaagtctataagctactattgcttagtgcaagaaaaatacctcttttaagtgcttatcctatatgtaagcagatgtctctgatttaatcatcagtgctatttgtttctattttaattagaagaagaaattgattcgtgtaaagtattataattgctaatttgagtttggtgaataaagatggtatcatagctttgacttgtgtcatgacttggcaaagacactcggctatgtccgcaactatatcgccggcaaagacaagacagtaagtaaatttgttaatgttttaagtgatcacgtgcatttggctctatcctagctacaacatgaaccacctctgctgactgctgttacattaaaaatggtttttcaaacttttaatatggcctaatcttagagaatttgtataaacttggatcagaattatagtttcactgttattccattttatcaagcatactgttcaataaacttggatctggtttcagtgaattgcttgttaaagtgtgaatgttttaaattgggctagttatatgaggttaaggctaattatgtggacagttgttttgtttgcggaaattactctggcctctttatttactttcttttattctgattccattgtctatctgagaaattacacctaactcccctacttttatgtgaacttctgcctataaataacaaatcagggttggtaggtgtaatatatcaaaagagaaaggtgttggtgtaataactgatatgatttttgctaaaatatccagctgattcaattgtgtgcatggaataatttgtaggccgggttccggaacttgggttattttagctataattagaaactagtaactaagctgacaaaaataaagagatggaaggaatcttgctgatgatcttaaattccatcaatttgttaaatatgcaccagtaattgttggatttgtaaaggttattattctcttaacttttggaagatttttaattatatatcaattgagagtaaaaattatcttctagctatagttcatacatcttttctttttaaattattattatttggattatctttgtcggaaagagctgtgacagtcacaaaaattagtttttttttttacattcttttatatatatgatttacacattaaaaacttttttatttttaattctttaactaatatttttaggacattaattaacaagatcattttgatgcagctatgaaaaaggtcttacttagttcattcctctctatttgcatatgcttgtttatgtgtcttttaactaaaatttgcttgaacagttgtcagggaacttcactatcctgctatttcattatgctggccaaactactgaatgggatgagtttgaatggtcaaagcaggctattcatgtgagtgttcacaaaaataatattaatagtgtttagtgcttaactaattttgattatgttaatatattttagtctgtctgactgctcagttaacttgttgctgcaatgcacattattaaatttgggtctgatttagcaatgttttttcaataagtttatcaataagtatctatttaccattaataagtttaaactcttgctggtacaatattgattgatagagaatggtaatatattttccttagtaccattgccacagtgttaattagtttttactctcttgttatctcactttccataaaatccgcacatttgaactatggaaaatatataacagcaacatgtaatatttagcttatgattctataagagtagattggaaaccagttctgccttctgagattcataaaaaaccagtgcatatctatttggaatatatgaattgtgaatttagaactcagattgagtctatcagcttagctctcacctagtggaataaggcattgttattattcttattgtcgttatatagtataagtattacatttgctgcatccattactatgctagcattattattcatacattgattgaaaaaataactacactgtagcaattttttttttctttttgcagaatggtgaacaggaattgggagaggcttgtaaatatgtagaagaaaaactagcttagctgtcaaggtaaggtctccttaataaacttttttattttttgtatgcatattttttaagcttaagttatcagggtattgaaaaatgttaattttatcataaacacaaaattatttaattttaaaataattttaaatatttaagatagtatatnnnnnnnnnnnnnnnnnnnnnnnnnnnnnnnnnnnnnnnnnnnnnnnnnnnnnnnnnnnnnnnnnnnnnnnnnnnnnnnnnnnnnnnnnnnnnnnnnnnnnnnnnnnnntaatgccaaagataggaaacaataaattaaaagacatgaaattagaaagtcaaggtcaagctgttccgtgctatatgtcactatcactttaattcatttattttatttatattgtatttggtaaaaaggtaaaagaaaataataaaaaaaaaagatgaaagaaaataaaaaagaataaaaaaataagattatttggttaaaatgaaagaaaattaaaatgagataaaattaaaatgagataaaatatttaaattaaaaaataaattatgcattatgaaatttttattttatccttgctttaaaaaattgtccaatttatttttaacttaagatatattttttaaaaaaaaagacatataatcaatcataaatgaaatatttaaagcaattgtgacaaatgtacttatcggctttgctatacaggataccatgatgatgggtgctgacaactatcaatggacacattgaatccccttggtcaggctcttcatgctttcataaattaatgggaagcatatgcctgcttgtgagttaattattgtgacttagatgatcatggaaattaaataagattttctccctatttttcatccttatcatttaactttattttgtaatgctagatctgtattgaattaattccttatatataatatgttgaatatattgattttagttatagtagtatattcatcgcttcctctgttcctttttgttaattcatgggaaattcaaaaaaaaaatagtgttttaaaagaaaaaatgggagcttcaaagtcggttatttaaaataactgacttcgtaatcatacttctaagtcggttatttgggcaaccgaccttgtatcctaactatctaagtcagtttttcaatgctttctaagtcggttatttaaggaaccgaccttgtattcgaactatctaagtcaggtttttcaaaaaaaaaaaaaaaactgacattatattcaagctttctaagtcggtttttgtaataaccgaccttgtaaggtgactttctaagtcggttttttagaataaccgacttagaatacacgaaattttttaaaaaaaaaattaaaaaaaaaattttcaaagtcggttttttaaaaaccgacgttgtaggcttgtgtatattacgtcgcctgagacaaggtcggttacaaaaccgactttaaatggccaaaataactgacttagaagcctcctgctgtagtagtgcttttatcaatttttttattaaaaaaactcaaatccaaaacattagtagtctaagaaatttgaattcaatttaactggaacgaacaacatattaatatgtaaccccaaattttagcatgcattgttttttattgttattattataaaaattctcttatagaatcaactttaggttctattcttctaggagatcgattttacccttattctaattaattatttagaactgtttagttaaaaaaacaatatattttcattcaaaatttgaaaatcacatgtccttttcttttttaagcattcacatacaaaattaataacaatgacatttattttctatatattttttgaaaaaactaatgtagtaacgtttatctaataactaacaaagatctggaaaacaaaaaagaaaaccacaaagcttaaaaaccaaacacgtattcattttgcacttcacatcgaatcatttttatttttggatttcacatgttatgaataaatgctagtgatatcaactttccaacattcttcgtccattttaacggttcctaattttactattggttaaatctctctcaataatagtcaatagtttcagtttcgtccctttttgcaccaaaaagaaaagttttctttctttttactcttaaaaatgtcctggatagcattatctggagctagtttgcttccatgatagcgacacggtataaaacgtgaaaaagtgagaccattggaagaacgtgagggaatccaacagaatgaaaaaatattcagaatgaatgcaatcactgaaccaagttcatgcaccttattcaaataaaacctaatagtatgaatatataaagttaacgtacaattgagttttgttcgccgaaaaagtaaataacctaagtttcgaatgcataacccagttaggttatgccattaggcacaactaaatatattcaaggtccaaaagaaaagtaacttggttcaacgcaagtcatattcatgttagaccgaaggacggtacaaaaagtagtcacagttgatgtttcgtagaagaaaaacttacactgcttcagtcttcaccatatcttagttcttttcgcgtctcaatcaaatttctttgacctgtttaattataattctttcacagttgagtagagagactatatgggagattggtaataagtcatgtgtgaacactaaaatgatgtgattagattatcgttaaaatcatgttgaacaaagaaattgtacgttccaatataagaaaatttaaagtaattatatttttttttatcgtaaaaaacaattatattgtaactttcatctcaaagtctattgacgttggatttaactgcgtcctgaacacacgttaaggcgttaagcgtttatctgttcatgcagctgtaccggctagtgttagactaagtgtgatttgtgtatatgtaatttggaactgcgtcaaaaactcttcatacatgcatctccgttatcgtacgttcacataatataaactttaaataaaaatcatgacgtgctttcacctgcatgtacaaattttccatagaacttatttgtaaaaataataatgtatataaataattatagataattgattaccgagtatgcatatcaatcactaattgtgtcttcgataatagacggaatcaaaatgttagcaatgatctattattaaatagtgtttgaaaatattaaaggttattagtgatgatctattttctaaacaaaagtagttttgttctctgtaacataacgtcagtactaatgagaaaaaaagaagaagaagatttatcataataaaataataagttaataatagacatttaatgcattaactttcacatattactttattgaacctaaaggaatataaaaaagcacaacggtcttacatttcctataaataccaagagaaatgaatatcaagaaaacttttgattgtaatttttttattatgttggttgttaatggttaatttttttgttagtgaaaaattggttaatttttttgttagtgaaaaaattgaactcaccactttttttttctttcttctttttttactacctactaaccttataactctattttttattgcaaactannnnnnnnnnattgaacctaaaggaatctaaaaaagcacaacggtcttacatttcctataaataccaagagaaatgaatatcaagacaacctctgattgtaatttttttattatgttagttgttaatggttaatttttttttagtgaaaaattggttagtttttttgttagtgaaaaaattgaattcaccacttttttctttcttctttttttactacctactaaccttataactctattttttattgcaaactattttcttaagctcttgcaatcatgttatatgttctctaagtgtctagacaaaacatttaaagtgagtgaaccttacccttaactttttcttagtgaaaatggtagaagcttaaagggtnnnnnnnnnnctattttttattgcaaactattttcttaagctcttgcaatcatgttatatgttctctaagtgcctagacaaaacacttaaagttagtgagccttacccttaactttttcttagtgaaaatggtagaagcttaaagggttttttgttcaaagaatatctggttagctgcttaaataagcaagtcaaagaatacccgtgtttgggctaccttagggtttcattgagttttaccacaaaatatatatagggtcaacatgtcaacatgtcaaagtaatttaaccatttaagctttaaaaatttttatttttatatattttggaaatagtttcacaaatggacgtacaataaaaattttctaactgtaaaaattaacgcctattgtatgttttagaaattatttttcagtctttgacaagaaaaatgatacttaaagtataataattatttaagtcacaagtcaaaccaacaactttataaaattaatgtaaaaaaaattaaagtagtactcataaatttattaacaattactaattagattggtaaatcaactactattttacaatttatgttattttcatataaaattcaagtaatccaaattaaagtacaaataatacaaattaaccaaacttcgtggaaaacgaaaagttgctatggtagtcatcaaagaggtgatgtttaacactttctttaatttgaattgttttagtctcgactgcaaatattttttttttgtaagtgctaaattaatttatgctgagaacattttaattatatgacagggctaattctctcatcaagaacttttgctatgtacaaaactcaaattcaaaatctcactttactatattaaacatgtaccacttaaatcaaacagctatacctttgttgcattgctctgaaattaatcggggttgaacgcttgacctccctgtacacaaaaattcagaggcatgcaactatgtttctaatagcaatttaactatttaactattacaaactttgaacagtgaaatagaaagccaagtagagaagtacatagtagtggactagtgggtgttcccaaattaagaaaggtttgtaggcgtaggaagcaaaatgaaaaaaacaaaggaataagtctcgttttaattagatttggagttggaggaaggaaccacatcaatctagctatacgctgtagtttcatagatgaagagtgactatcaataagctgaatagtgacccacatattgagtcacccaactggttaggccaatataagagggtcaaagaaggggtttaggggcacgtgaaggcaaaaaggaaaagggttaaaagtctttcccatatgcacaaaatatatggtcccctacccttattttcttagagtggttcaaagtggctctcctttttcccttttttttttgaagtaagcaagtactacatagcaaagttggggcatgtcgcccacggtccaatgggccctcctcaaatacccccacctggcccaccaccatatatcccccatactctccaccaagctagttagtcccacttatttggcccccatccccattcacaataccaacctccagcaaataaattaatatcactatgccttttatggtgcaattaactagatgaatcattgtaagcaagtttttactatagtccaaaaatctagttcatttttggaataaaaatattaaacaagtttacaaatgttgtatacaaactagaaacaacctcaatttttgcaaaggcatcatgaatggcatttacaactattaagtaggtataaggagcccccactcactctttttcccagtaatttctaaaaccatttttcttccttttatgtatattccacaaatcttgtttacttttgcaatagaaagataaattatatagcaagttcttagtttttgcactactaaaaaagccctatacaaactagaaagggacttaattttggcaatggcatattacaaccactaagcaggtataaggagccccccactcactcttttcttcctttttttcacactccacaagtctagttcatttttgggatagaaatattaattaaacatttgcacaaatacaaaggccgtataaaaactagaaagagcctcaatttttgcaatggcatcatgagtggcatattacaactattgagtaggtataaggagcccccactcactcctttttccaataaattctaaaaccctttttcttccttcttttttcttggttcctctttttttagatgggaaagatgcacaatttcagagacccacttcatgatttagtcgtaagaaggctttgctaaacctaattgttcaagaatctaggaccataacgcatgggaagtgatagtggtgcgaaggtgggacaatagtgttgggaagccagtctcttcaacaatgtggtagggtttgtgagtttgggatcatcatgatcttctaaggagataatttgcatagtatgtaaaaaaaatggaatcataaaggaactgattgaagagtgtggtctattgccagaaagacacaccctaagtagcaggaattccaatgcataattaattaagatgttgccttgttgggtatggaaaagtgcttttaaataattggagtttttggtttcttataaattttgaagttccttaggtatgcaaatgatattataggtttcaagtgatcacttttttttatgataatccctcacaattacttgcagcagcgtttgtaacttccaaagaaattaaacctttaatttgtgttcgtacaagattgtaatttaaaggtgcaccaatataataagtaaaatctaaaataaaccgagactttaaactgagagttatatgttgattttttttatattaaaatttgtgacttttttgttttataaaaattaataataaataattttttaaaaaaacttaaagtttaaaattttagtagtcttactcttgggttgccttagtaattttcacaataaaataaggagaaaaacatttgataagaaattatagagtatgaaaattgacaaaattgaagaagctcctagcatataaaattactactctctttttgttaaaattccttatcaatatgtacatattatctttttggtgtgaatcaggaatccttccattaaaaattaaacactaattttcaagatattgaaatttattaaaagattcaacatcttttaacatatattttttcaaaagcacaagtcaaaaattgaatttataattacatatttaaaaaataaaattatctatcaattatactatacaataggtggtgtctgttcatattatctagcatttttgataaataaaataaagttgagaagaagttttcgatcttttaaaggtttggattccacatagcagtgttgtagacacaataaatcggtctcttacatgctttgggatgcaataaccccatgttcctcaacgtgctgttgaccaacgtgcccatcaagaaggaactgtttctcccctttattgggcctacggatttttttggatcaaaatcaaatttcaattagtccagctttactagtggttcctgtcaagctaccaaataacaattatacacccacacacgcacacagcaatgaagtgaatgagcacatgtaaccaaaacatataacataataaggtgacgaaattaggctgttttaattggagtggtactgttgcgtcacaaagtgatgcttaactcacggcaagtgtaccgatcgttcaagtaataaatttaataagtagagtatcgtctccacgaggattgaggcactaaaataattgtaattcttatcttaaaattggaaagaataaaaaggaaagtaattggatttgagattggatttgaataataaaaacagaatttaaataaaaggaaattatgagaatgaattatgagagtttatccagtaataaagaataattgtaatgaaatcctaatcacctttgatccctctttatgtaaattgaattgatatttaattgcaattgttataattactcaaagatattccttcatagattggttaaacccagattttgtcggtctttttaaccctttaatcctattcaagtgtcctaatgtcttagtaaccccctttcagattaagcattaagttggaatataaaagctttgcaatccttcatccctatgtctaggtaatgtcaaactgtcctctctatcgctttcagaaactaaaaccccaatatgtctattacgaattaaagccctaagttcctctaacagattgatcagatctattaatggaaattatacattcaagaacaagataaagggaagaaatcataacaatattcattaattatcaatccaagcaacacaagagttcacataggcttttggctttcaccacaatcaagagaattacctagacatgatatgtctagctcaatacaagaagaatgaagaataagaagaatacagggaagaagagtaatcaaactcctcaatcttggcttcttccttatgaaccttgaattcctttgcgtaatgcgtttttctcctcttgtgattgttctctgcctttttctctctgttgctcatgtgaaagttgtgtcttttgtgactcacaaatgttatatttatagctagggtagctaaacctaaaagcccaactgatcttatcatgaaaatcgcattctatctttaatcttcaatttgaattcctagaagcccaactaatcttatcatgaaaatcgcattctatcttcagttccgtaaccgccgcgcgactggctgcatttctgggttgcttctttttgttgcttgtttcttcatttattgtaccttgcataaaaataacaataagtaataataatcacaaagtggtgaacttttggcttaattctatcatttatctaacattttctactaaattttgactaaaactatcctaaatttcaccatatattagcaacctatcaaataactcccaaatttaaacattgttgtcctcagcaataaaataaaatagaacttgatttcaatggaatttgtattcaataatctagcatatcatcacacatacaatcttagaactattttgttaaatgcaattgaactacttatgaaaatttcaaggatacttgttaagtctatcaatcatgaacatggtctgaatacttctcacttaggaatgtaatcactcgacacttaagtgttttgggtaactgtataatcgttcaattcctccaaggctataatatgaacatgaacttgattatattctcgggtccctgaaaatgagaaacatgaatagatgcacaattaatcaaaaggtctttaaaaggttgtaatgtggcctggcttgaggtaggaatgatttggatagtagctgaatctgagattgaagcatgtcagtcttggtcaactcttatctaatccacctccttcttcattgttgtgccaacctttttgtacctctggcttctctttttgtttctctttttatttctttatgcaaactctcttttttttttttaggggagagaagaagagaacatctttccaatttgccagctggtacttcaatttcttttgtttcactggattgacttctgagtttgattttcattgatacttagctaaatccagtggtgcacttccttttccttcttgtgggtattcatctttctatttttattgaccttgacctattttctttttctccaatctcaaataaggtagtcaaggataaaaggttttcaggtgaatgaatagaacagcttaggctcaaattggctaactatggatattatttaaaggtaagttatttggctttagcttagaaagaaagaacatgcctttatcatcttaatcatgcaaatatcatttaagaaacaaatcaagcccctgcaatattattaaccatgaggtcactctaaaagaattgtactgtataggctcaaacctcacaagcttatagtatcagactaatgttcctttgattttcctaacaagtattccattctttttcctaatgtattcaatcacctaactcgtagttctagtcctgtattatgcaattctatactttaactatttcctacatgttccaaatcaatcaacaatatcaaatttttttcactgtgtcaacaattttaaatctgaaacttatttaaggctctaacatattatttgttcctaatttctatttaagcattcttctcaaaaattaaaaattaacgtaattatgcgtccccactcccaaattttaaacattactgtccccagcaataaataaaactttataagggacgaaacaacacataatttcattgatttttgcaagatatctctttcataatttattcattcacatatgtccatgttttagatttttagattcagaccaatttgtttgacatgcatttaaagctagagacttaaaaataataaaacatcactgaatttaaaaacaaaaatctaaatatttgtccttgcaactttttgttcctgaggtagcacctttcttctttgctccttggtctacttgttttccctgaaactcagaaaatttttccacaacatatatgcagtaaattttgtgatcaatacaagtatactgttttcattcaataactcccaaatttaattactttgattggtttaaaatatatttattatatatatatatatatattttttttttaaaattttttttatatataataaattaaactaatgaagtataaatgtaaaaatccttggattgccttccaagaagcgcttgtttaacgtcacgagcctgacaccgacctctttaattttcagggaatcaactgccatggaaatagtattcctatccacttcccctccatgataatttttaacctacacccatttaccttaaagggtctttcagcatctagaggggaaatctcaacagttccatagggaaacaatttctttatcacaaatgagccagaccaatgagatttgagtttacctagaattggctttaatcgagaattgtacagtagtacctgccgtcccgatgtaaacttctttggatgactttttctgtcatgccatatttttgtcttcttataaattttggcattttcagaagttgttaatttgaactcatcaagctcatttaattgcaacaatcttttatcattagctttaaagagttcaaaattcaaaaatttattagcccgcatagtcttatgttttaatttaacaggaagatgataggacttaccataaaccagttggaatggtggcatacctaccgaagtcttggaagttgtcctatatgcccagcgtgtatcattaagcttcattccccatttttcctagaatttccatctgttttctttaagatcctcttcatctttcgggcttgtatctcctctttaagctctaattttggtgcttcaattactgtatcagattctttcttttccagcaattccataattacctcaacctcttcttgcaaagtgtctgtgtttaaggcttcaggttcttcttcaagtttttgatcattagtcttatctgtatgaagtacagtatccagaacatctactctgaaacagtcatttttgttaataggatttttcatagcattaaaaacattaaaaataacagattcatcaatcattctgagctctagttttccatcagccacatcaattaaagctctagctgtggccaaaaatggtctacctaaaataataggtatctcactttcctccatgtccagaactatgaaatctgctgaaaaaattaatttatcaattttaaccaagatgtcttcaatgactccactaggttttctcaatgatttatcagccaattgaagagacatcatggtaggtttcaactcagaaattcccaaggatttgcatattgagaggggcatcaaattgatgcttgctccaagatcacataaagccttacccacatttacattacctattgtgattggaatgttgaaacttcctggatctttgagtttgggtggaactcgcttttggataatagcgctgcactcttcagtaagcacaacagtttcacattcttttaatttatgctttctaaataataaatctttcataaacttagcataattaggcatgttagcaagagcttcagcaaaaggtatattaacatgtaattttctaagcatttctaaaaatttagcatactgcttcttttgttcttgctgcttaatcctcatagggtatggtggtttttcaaaacgtgaaaaatcaaatacctgtttaggcttttcagctgctgaattcttttccttacctgtttgtgtttgatcttctgcttcttgcttctctttttgattggctttatcctcttcactatttttctgcaccactataggtttctcttgaggtattatcataatttcactccttgtagtgattgcattgacatgctcccttggatttactatggtgtcactaggaaattgccccggctgtctttctgctagttgttttgctaactgtccaatttgattctcaaggttgtgaatagatgcaccttgatttttgaattgagctctggtttcctggatgaatgcatttgttgcttgaacatgctcattagtggctttggacagttgtattatagctttctcccatttagctggctctttaggaggaataggtggaggttgcagataattgttggatttgtaatccaaccctcctccctgatatttcctctgaaagttgttacccccagcaaaattctgatttctttggtagtattgctgaggtctctggtcataccacacatcatttacttgatctgggtctgctcctatcagtgtgggacattcatttgtcggatgattgtcttgacagtattcacaactgaataccggagctctgcttggtgtgggttgtattgcagaaatttgaagcttgtcgattctttcattaagcttggctaattgttgtgacaatagcttctgttctgctagcatagcatcgctattccccagttgaattgtctctcttttggactgaattacaatgctttcattctcgtttgttgctagggagtcaatcaactcatatgtctgagttgctgttttagatttgattgtgcctcctgctgcaacattgactatcatccttgattcaggagtcatcccattgaaaaaaattcgcaccttcttcccaacgggcatatcatattgaggacattttctgatcagctcctgaaatctgttccaagctgcacacaatgtttctctaggatgttgagtaaaattaatgatttcattcactaatctgttgtatttttccatagagaagtgttgggcaaagaacctcgcaactagttcatcccatgtggtgatgctattaggaatctgtctgtctaaccatctgagagctcttcctttaactgcaaaaggaaacaatctcagtctaattgcatcatcacttaccccttgatgttttattgtatcacaaattcgcaagaatctgtccacgaagtcatgggggtcttcatcatcttcaccaccgaattggcttctctccaccaaagtgattaatgatggatgaatatcaaagttatttgtgaattagagttttctgttatctgtttttgcttagctagcttcctgtttcttcttgcagtcttttctatttctggatcaaactgtaaattttcaggtgcaactaaacctcgcataaactagagaaaacagattagtagagcaaattccaattttaaaaataaaattacaattaaatttgcgtactcaatccccggcaacggcgccaaaaacttgttacgtcacaaagtgatgcttaactcacggcaagtgtaccgatcgttcaagtaataaatttagtaagtagagtatcgtctccacgaggattgaggcactaaaataattgtaattcttatcttaaaattggaaagaataaaaaggaaagtaattggatttgagattggatttgaataataaaaacagaatttaaataaaaggaaattatgagaatgaattatgagaatttatgcagtaataaagaataattgtgatgaaatcctaatcacctttgatccctctttatgtaaattgaattgatatttaattgcaattgttataattactcaaagatattccttcatagattggttaaacccagattttgtcggtctttttaaccctttaatcctattcaagtgtcctaatgtcttagtaaccccctttcagattaagcattaagttggaatataaaagctttgcaatccttcatccctatgtctaggtaatgtcaaactatcctctctatcgctttcagaaactaaaaccccaatatgtctattgcgaattaaagccctaagttcctctaacagattgatcagatctattaatggaaattatacattcaagagcaagataaagggaagaaatcataacaatattcattaattatcaatccaagcaacacaagagttcacataggcttttggctttcaccacaatcaagagaattagctagacatgatatgtctagctcaatacaagaagaatgaagaataagaagaataagagtaatcaaacccctcaatcttggcttcttccttatgaaccttgaattccttcgcgtaatgcgtttttctcctcttgtgattgttctctgcctttttctctctgctgctcatgtgaaagttgtgtcttttgtgactcacaaatgttatatttatagctagggtagctaaacctaaaagcccaactgatcttatcatgaaaatcgcattctatctttaatcttcaatttgaattcctagaagcccaactaatcttatcatgaaaatcgcattctatcttcagttccgtaaccgccgcgcaactggctgcatttttgggttgcttctttttgttacttgtttcttcatttattgtacctaaaatgcataaaaataacaataagtaataataatcacaaagtggtgaacttttggcttaattctatcatttatctaacattttctactaaattttgactaaaactatcctaaatttcaccatatattagcaacctatcaggtacaaacaagagtaatgctaaaaatgtgattaaatatttagtatattttattgaatatctttaattagttaaaaatataaatattaaagttttttaatttctcatgtgtctttcttcagcagcaattttgatcaaagtaagatactaaatgttgattctccttttaacgagaatttggacctcagtagtccttagagtatttatctttacaacactgattagtactattattagttaaaaataattatcgaaaaaatattagatgtaaactgaaggaaaaaattaaaagtttggggagtcatagctgctagacgtagctccaaactgaaccaaagttggaaagaaacttttattgagagatttatcacattcaattgtttaaagagagctttttttcttgtttaaataacattataaataaatcctaggttgcaaaggccataataaaaagaaaatatttcatgtcagaaaagggagtaaaagtgattccgcgtcattaaatgtttcaccttaatcccatatcctcacaacccaatacatgtcaaaagattgatacctagattcttttttttctgaggggagattgatatctagattagagatcttgattgagtttgacttaaatttttattcaagatagttacgtatatattgtatctaatcttaaatataagatatttttaattaatttacgagaattaagaaagatgataaatttaattaataacatttagttttttaataatttatattattttttcaaattagtctttaagatttaagaattcatcatcccactcttatagttaattcaaatatcaaaatcttgctcagggacccccaaatcccaaccatgggaaggaacattcttcgaactgtagatggtgccactctcatggactcacattcctcgtcccattccattctcagaattggccattcctatcttctttcaactttttgaagcattcctctaaaaattcctccaaaagaaggagcaatttccaaaatacagctaagcaattgttccaccttctcatgacctctttgattttgctagctagctagttctatcttgttaaatggtttggatcaaaattagggacatattcaatgggtctcctagacatgttggatgtatgtttatggacacgaatttttgttgtaaagaaaacttggcaccaaaaatttcagtgtgtttcatatacataatttatctgtggccattcatttctttcggaataaagcacaagatgtgagtccatgtggtattgcttaagtgcctttaagtcaatttattctactttttcgttaggtagggtgattatattaactgtctgattagaattccttgtttgtttttttcctattcttgattttcttcttagtgattcgccttaacatggcaaaaaaatataagaaagatcttattcgaattccctttaaattgttgcttgctctcattttaaaatatatattttcctacatttagatttggaatttcttcccctcaccatgaccacatactctgcagcttttaaattctgatcattccactataatttaatccaaaaataaaatggtggataagtttaagtcattaatgaatattgataccaaacaaacacggaagggtacatcataatccataaggggagggagttgctaagtgttgactataccaaatcgagcatatttcatttgtcacttctacatcattgatcattgtagaaccacacaccttatccatgtgttatatgttcaaaatactagttttctaataatttgatttaaaaagaaaaactgaaagagtgtaacagattaaaattgtcatttatatacgtctatgtatatgaataaagcttgtgatacaaatgacaatttttaaggtgctaagaatatattaaaagaccaacaatgaataatacaagtggtagccattttttttcttaaccaattgatctaggatctctctcgtttatatacgtctatgtataacaatgagttgttattatctcatagatttgaaacacaattatgttctcacgtggtaggatctctctctgggactggaccatagtgtgtttcacgggccttgttgatttgggttcctcttattgtgatatacttgttgattttttgaaactagtttttttttaagaaacagattgtgatctctcataaatgccttgttgggggaaaaacttaatacaccataaaaaacactcatacacccagacataaacagtgaaagcccagaattgcccctaaggaaataaacaaattacagacctctcattttcccttgtcactattcactccgtcgtctgcgcactcgccgtctcattttttgcgatttcgtggtggttgccggcgcacgccgttgctgtggtcaggttggacttgggttttgcagcgggaggtttattgttggtcgactgtgggaggtttattgtttccggccgccgtctgaggtaagggacgcgattgaagggatttgtatgtcgcacggattggttaatccgtaaacctaacacggattgagtaatccgtagaacctttacggattatatgatccgtaaaggttctacggattactcaatccgtgtcatataatccgtaaaggttctacggattannnnnnnnnnnnnnnnnnnnnnnnnnnnnnnnnnnnnnnnnnnnnnnnnnnnnnnnnnnnnnnnnnnnnnnnnnnnnnnnnnnnnnnnnnnnnnnnnnnnnnnnnnnnnnnnnnnnnnnnnnnnnnnnnnnnnnnnnnnnnnnnnnnnnnnnnnnnnnnnnnnnnnnnnnnnnnnnnnnnnnnnnnnnnnnnnnnnnnnnnnnnnnnnnnnnnnnnnnnnnnnnnnnnnnnnnnnnnnnnnnnnnnnnnnnnnnnnnnnnnnnnnnnnnnnnnnnnnnnnnnnnnnnnnnnnnnnnnnnnnnnnnnnnnnnnnnnnnnnnnnnnnnnnnnnnnnnnnnnnnnnnnnnnnnnnnnnnnnnnnnnnnnnnnnnnnnnnnnnnnnnnnnnnnnnnnnnnnnnnnnnnnnnnnnnnnnnnnnnnnnnnnnnnnnnnnnnnnnnnnnnnnnnnnnnnnnnnnnnnnnnnnnnnnnnnnnnnnnnnnnnnnnnnnnnnnnnnnnnnnnnnnnnnnnnnnnnnnnnnnnnnnnnnnnnnnnnnnnnnnnnnnnnnnnnnnnnnnnnnnnnnnnnnnnnnnnnnnnnnnnnnnnnnnnnnnnnnnnnnnnnnnnnnnnnnnnnnnnnnnnnnnnnnnnnnnnnnnnnnnnnnnnnnnnnnnnnnnnnnnnnnnnnnnnnnnnnnnnnnnnnnnnnnnnnnnnnnnnnnnnnnnnnnnnnnnnnnnnnnnnnnnnnnnnnnnnnnnnnnnnnnnnnnnnnnnnnnnnnnnnnnnnnnnnnnnnnnnnnnnnnnnnnnnnnnnnnnnnnnnnnnnnnnnnnnnnnnnnnnnnnnnnnnnnnnnnnnnnnnnnnnnnnnnnnnnnnnnnnnnnnnnnnnnnnnnnnnnnnnnnnnnnnnnnnnnnnnnnnnnnnnnnnnnnnnnnnnnnnnnnnnnnnnnnnnnnnnnnnnnnnnnnnnnnnnnnnnnnnnnnnnnnnnnnnnnnnnnnnnnnnnnnnnnnnnnnnnnnnnnnnnnnnnnnnnnnnnnnnnnnnnnnnnaaaaaaaaaaactctttcaattcatatatttcttatataaagagtgatttactaagttaaagacatgaacaaatgttattgactcgaggctttaaaagctatatatatcgtacgtcttctacctaaaaaaaaagctatcggttttcaaggtacgtatatctatctatcttttgtattctttccttttacatactgttttttttggtgaatgagttcctttgacatatttagtttaggttattcagggcgtattaaattaggaaattattttaaaaatatcttgttttatttgatttaaaagtttataggtcataaaatttcaaaataataataataaaattaaaatgaattataaacaacaattatttttaaaagaattagtgcattgtttagtttctcattacactagacaatatgtaggaacgagtttcttcttcttcttatttcttttatttattacaaaaaataaaacatattttggacaaatcaatttaacctaactatcttttttttnnnnnnnnnngtaatccgtatgaggcatacggatcctgtaatccgtatgaatcgtacggattagctgatccgtatgatacatacggattacaggatccgtatgaatcatacggattacaggatccgtatacgtaaaatctcagcttaccttcccaccaccgctgtctgcagctccgagccacccaccaacggcaacccaaacaccaccggccaaaacgcacagcaggaaaccagaatgccgtcaaccactacaaaaatgatagctttgataacaaaaaaaattaaccatgtcgcgtgtgctgtgctgcagctgttcgttcctcatatatcaaaaacaagggagggcattttcggtattttataaaatttctgggtgtatgagttctttttatggtgtataaagtttttcccccttgttgggtgtgacatgcttttgttcccacactatacatcaggaaggaaattgactgatcctactatccacggcctgaaatgattttgggctttcaatgatttaagtttgggctacttggtcatttgtttttgttgttgaatctcaagttatttgtttcttcaccgaccaaaaaaagtgtctatctgacatattgctttcttttaatattgatgagaaaacaagattgtcttctacaatactggcaaataatcattgatgttacataactttatcaaactgatatagaagaggatttcagtttggaatgtgattattgacaatgaggagagaataatatgcttgctagataagatatcatcataggtgacatggagtagtcataatttgcattgtattttcccttttaatcctaaattaggatgaaaagcgtgtgaaattgtgactttgtgagtattctccttgttttttttttatatcgtattattgtattatatatatcattttaaaactataaacatattgtattttcttaattattttgagtctacacccaatagattttttatttatttattactacatccgatagaattcggttaagattggatcctaatgcccaaatctttattgggccaatgaatcatccaagtccccccaaaagtccattgagttatttaacatgttcatctcatgcatgtcaagaactccaaagaaaattgttaaatataccttactaaattaataatatttctccatcatctacggtaaatagtaagttaagtggtccaccgattcaccactattatcagtccttagatttattattaaaatatttgaatggttgagattaaaattaaataatcttttgtagagattggtattatataaatattatcttgtaatattatattaaaatttgtaaaatattcatgtcaaattaaaatttctcaaaaaaaaggtagcaatattttcaacattaaatgttaaaccatgaccattttaaaagattaatgtagctaaaaaaggtagcaatatttaaatgtgttatattgtaatatgataagaacatgagattgttataaatgaagcacaaaaagtgataatgaaatgaaaggaaacggtcctttaaattatatgtaaaaagcaatctaaaaacataagaaaacaaatattaatttgcccttttaggttaaatacaacctctgtaaaccattttgaaatattgcgtgattcaaaggaatttctaacttttggttgcatgcatatcttattatggaatttttatcttgttttgcaaggttaaggttgcctctcttcatctaatgacatgtccattatttgcttggatgtctttctccttaaatggccctgattttaagattgaatatgtttcttcatgtgattaagagatcgatgtgtcttttgtctttttggatgccttctatcctttacatacatttataatatatcattggtttttcattccttttttatattcataaagtgaaacatatattattactttatcaaatattaaatataaaaaaaattattttgtaggataatgtgtattaaatataagaactataatagatattctttttttatcagtataaattgaacacaatatcttattcaaccaaatgaattatatctccttaatgaactataatagatataattttaaacattgtaacaaatcattacctttttatggagtagtatcattttcaacattatagactcctgatcattttcaacatgattgaatactcgaaatttaaaaaatcaaacatttcattaaggtcttgaaaaaaattaatgtttcatgttaatttgaatttagacaattttatttgttgcaatttgaatttagacaatgataattatttgagtgaaaagaagttgttgttgtttgttgtaggttattattatatgtagaaaggtttgtatattatagtagttattgcgttggtaataccattattatggagaaaaagtcttgggtagacacacactcaccacgtcatttatggatacaacaaatcataaatggacacgtattaaataaataaatctgcatttccctaatttatttcctccatgcatattgtcctcgccaacaaaatcggcatcaactacatgcagcatgaggcaaacaatgaaccaccacgtcgatggggtgaacttcctcaaacaggctcgcactttcatcgacacgggtatctccataaccatcatcaaggaaacatcgaaaccctttttttttttttttaatcagccaattgaaacactcattgtgaccaacattcttttgtttcaaggcacctagtcatctcacccaaacatcatcatcatccccttctacctcaaaaccgttgtgaaccctatcaatatcttctagtattttattattgattcttcctctcctttgtgcctctaaatgaatgataaattttgtattttaattatagattatagagcgaaacttatgttcatggaccaacaaagtagaggtccggggaggtatgaacatgtttttgagtaaacatggaccatctggtcgaaaatttgatttttattttattttttatttcacacgtgtcataatattatttgttgtttctaagggtgaggtggtgggtgtgtgcccatcaaagactttctctattatggatgctccggttaggttatttagttatttgaataaccataaccatataatagttatatgacaattggattttataaccatattcattgcttatttttcatatgtaatcagttttagttttgtaaaattaattttgatttttaaaaattggttatataaattttctgctttgtttctatttttcccattgataaaaagaaattcaaagtcggttatataattagatagctttgagttccctataacttatatttggggtcctttttttttatctacatcttgaactacttaattaatctttgggccttgaaatattcatcttcatcttaggagattgacatttgtgttaattgattttgggttacctaaggatttatatttgtgttaattatccattcatctaagaaaaaggattttgactaatttagaattcagtcaaaaaataagtaaaatctaatcatgaattattttcattaaagatggaacttgaataatactaaaataatttaatattaacttcagcacattaattatttgtatccaatgatttagttggattacctaaggttttagttttcactcagtcaaaactgtttgtttaaattattttgnnnnnnnnnnnnnnnnnnnnnnnnnnnnnnnnnnnnnnnnnnnnnnnnnnnnnnnnnnnnnnnnnnnnnnnnnnnnnnnnnnnnnnnnnnnnnnnnnnnnnnnnnnnnnnnnnnnnnnnnnnnnnnnnnnnnnnnnnnnnnnnnnnnnnnnnnnnnnnnnnnnnnnnnnnnnnnnnnnnnnnnnnnnnnnnnnnnnnnnnnnnnnnnnnnnnnnnnnnnnnnnnnnnnnnnnnnnnnnnnnnnnnnnnnnnnnnnnnnnnnnnnnnnnnnnnnnnnnnnnnnnnnnnnnnnnnnnnnnnnnnnnnnnnnnnnnnnnnnnnnnnnnnnnnnnnnnnnnnnnnnnnnnnnnnnnnnnnnnnnnnnnnnnnnnnnnnnnnnnnnnnnnnnnnnnnnnnnnnnnnnnnnnnnnnnnnnnnnnnnnnnnnnnnnnnnnnnnnnnnnnnnnnnnnnnnnnnnnnnnnnnnnnnnnnnnnnnnnnnnnnnnnnnnnnnnnnnnnnnnnnnnnnnnnnnnnnnnnnnnnnnnnnnnnnnnnnnnnnnnnnnnnnnnnnnnnnnnnnnnnnnnnnnnnnnnnnnnnnnnnnnnnnnnnnnnnnnnnnnnntttttacccatttcccttttcgtttaggatcttgaaccattttccttttcatacataatattttttctattacttaaagggggatgataggaggatttgactttcttaatttttttttatttataagaatcaactataaaaattaaaaaatttataataactcactatcttaattaaccaatgaaattagattaatagactttagctctaattgaattgttttaaaaagaaactcttattaaatatatcttaaagaagttaatgattattttaaatatattgaggtataaatgtgtctattaaatctatcataaaggacattaaatattctaaatatggttcctcnnnnnnnnnnaaaaaaaaaaactctttcaattcatatatttcttatataaagagtgatttactaagttaaagacatgaacaaatgttattgactcgaggctttaaaagctatatatatcgtacgtcttctacctaaaaaaaaagctatcggttttcaaggtacgtatatctatctatcttttgtattctttccttttacatactgttttttttggtgaatgagttcctttgacatatttagtttaggttattcagggcgtattaaattaggaaattattttaaaaatatcttgttttatttgatttaaaagtttataggtcataaaatttcaaaataataataataaaattaaaatgaattataaacaacaattatttttaaaagaattagtgcattgtttagtttctcattacactagacaatatgtaggaacgagtttcttcttcttcttatttcttttatttattacaaaaaataaaacatattttggacaaatcaatttaacctaactatcttttttttagggtcagccaaaagaaacattcataaagggtaccagaagtaccaattaacctaactatatatcttaggaccaatgtttttaagtgtcgtggaatttaatttccatctttctccatgcaaaagtgattacaaaacctaaccaagattatttattttaaaattcagaatttttctaattttttttcaaatctaataaaattgggctccatttcaattttttcctcactaacctagatttgtgaatcttatctgttccttttatgccacttccatactaaattttccaaatctaacaaaattgagctccctttcaattctttcctcaaacgctgctgcatgagattattagtgaagccaatcggttccttttacgccatgtccacatttgacaaaagaagaaaaacaatctaaaatcgcaaataatcaaatacgcattgatcactgataagaagtaccactactactacaaactacaaaagttcccctctccaaaaccaccctttttgtaaaaaaaaaataaaataaaaaactataaaactgtttcttgctaacacattatatcttcattcacattaacttttagttttctaattaactttagtttcgtttctccactgcttctgattaattagatgatgaagaggtagtagaggtggcgtgcaggagtaggagactatattatagggtcaacaggcagcggagggttgacgggattgcgttggcggcactttagtggacaaagcggcggcggcggctgcggcggcggagggcggtttgtcggctgtggaggtgacacgctcgcagcggggacacatggaaagtgtggaggcagggagcggctcgcaggagtgaggggagatcacggtgggtgggcccaccttcatggctcgcagctcctccacttccctctgcagcctccggttctgctctgtgagggaaccaaaccacctcttgaggtactcgcactccatctccgtctgcttcagcttgctcctgcataaaatctccactttatcaattattattttgtctacatcaaatttatcttttattcgaatgagatggattaattattattattattcacgaaacagttaaaacaagcattcattgaacgcattagatattgttgcatgggtgacacggcttcgttcacgaatcatcactttgcccttcattgcttctcatgtcaaatctaggagaaattgttacgtgtttgaaatctttatagattttattaatctctatcttgttaactgtgtattagctctattttgtaaatttataaacttaaataaatacatatatatactataacgtagaaattaattgagatttgagaccataaatagattggctttttctgtcaaaaaaaaaggttttacaaaatagactttttttgaagaaaaagttgtagacttaacatatgtttagaagagcttttacaaaatgtatttgtgtttatgaaagtaactttacgaatttttaatatttgttatttatttcaacaatttttcgaaaaataacaaaataagttttaatttgtaaagtgaattttacattcaaatttattagataaatacttaattcatttatatatttaaatacattatatatatataagataatttataggggagtaattatgagaagagacatgaaaccagtatttcttttccttatgaatttttaggtaaatatcttaattaagtacttattcaataaaaaaaattgtatggagatttatgatataattaaatacaatcatgaaacctattgaaataaattaaaaataatgttaataagctacatcaaaaactttattgaaataaactacaaaaaacttcaaaagttataaacaagttattttaacaagtttcatatcaacttctaagagcaatatatggcagaagatatgatccaggtaaatatgcagaaactggggaacaaagatgattatcatgaaatgaaaaatttattattgggaataagtgaagaaccccttcgcttttaatttatggatacgtgttgatgataactaaatacacgatgcttaatactaataattgatttgaaaagtcaaatgcatggttggtctaaagtaccaaaacaagtggtcaaagtcgcacttactggagtgatgatcagtgtagcacacgaggccaaataaaactccaccaatgcgatgctatcattatcgagttgtctactttaatttggacaacaatgattgtgttctttgcacacagctgaaattatggtttaacactggaactacatcattaactgttcatattatttgaacgccagctagctattcccatgtcattgctatgtgttcatgacctaagattatattattattattattatttgaaagagaagcacttcgtgtatttattcttatttaaaaaaaacagttgaaaaagtagtgaaaccaattacattgtaaagatttatgaaaaaataaaaataattatatattaatggataatttaaaataaaaaatatgtacagtaaagagtcaataattatatattattattatttgaatttaattaagttacattttctaacttattaatagtgtaattatagtttcgtcatatttgaaacttataactgagcaaaaattagagacaaaatttcccctaaattataacttgagtcttttaaaataacaaataaaacatcctataaataaatagaacatacaggtttgtgttgagtttgtgttttacaagtttaaaataaaagttttgcggaagagctttggaaaaagtaatatttattccaaataatagatatgcatatgtatatccttccaaaaaaaaaaaggatatacatatgtatatcatcatgcattatatataaactaagatttttccaaaccatatgttttcaaaactattttttcactctttcttgagttttaatggatctgtggcttgaaacttaatccaaatattttacctatacatatatatacccgaacaacactcagatttctttcatcgtatgacctatatcacttattaatgaggaattatgtgaaggaagtgcaacttaaaatgatcgctttccacttttagttagagatagtacggatgaatactaagggggtatagcatcggattcagattcatgaggtctatatcataattataattattctgtcaacatttgaaatttgtctgtatatatgtatatatggtatacccacagaaaatgcgggtaaagatgaaattttatatatatatatatattagtactatattaaagtcaagtcataaatgacaaaaataaattgcattaatgtttcatcactttattaattaggattgattagccatacctggccctacgattctgaaaccacacctccacttgccttggtcgcagcttcagttgcattgccaaagactctttctgcttctacaaaaccaagaattcaagaaccgtaatatatatttatattttatttcttttgtattttgtatacaataatcgcaccgaaattaaaattcatgatcttatatatattgtttattattcaaaactctctcccactagccgacgttactaattcatgagccttaatatattacttaattagtgcaactatatatacatagcaagcattagttatgacactaattaatttttaatgatataaatgacatgatattaaataagacagagagagagagagagagattggagggttatttacagggttcaaagtgtggttttgtctaaagctttcttcaaggagacgagattgttcctttgtgagacggagtttcttgcgaggagggtcttcattgctgccttcttcttcatcttccatgtttgatgccatccaatcttcttctagaggtacttggtttatgtccaattctttcactgtaataccaaacactgccttataaatatttatgtatatagttccaaaaataaaaaccttacagaccaaacaaacacatgatccaatatatatcgtttaaggacaagatagaaaatatgatttgtatggatatcatttctatttaatcaccaaccagagagagatgaaaaatagaaccctggtgggttcatgtggtcgtgatgactttaattttaatccaagaaagggtaagaaaaaataaataagttatccctacctaaagaaaacatatattttacatggggccacttgtatatgatagaaacaactgtagaagttaaaaaaaaaaaaattaattaccataaaattaaacaaacaagaacacccacaaaaaaaaaggaaggaatttaattaagatgatgtatgaggttgatcaaaatgacaaagataatgattagaagaagatacaagaaaattgtttatatatatgtgatacttaccagatgatgagggaagaaggactggtgaagaagcaaagccagggacagatatggtcaattccaagtttgaggagctacttggtaaaaccgccatagaaggtacacagaaaaaaatgaaaggggtgaagaaaaaaagatgatgaagatgaagaagaggaagaggaggatctgtgtatcaacagaaaggagagaaaaaaggtaaagtggagaagcagaaggagacacacatgaaaaggaagacggaagcagcagcaaaggatctgatgaaatgtttggagaggaaaaaggtcaagatatatagaaaggtcaaataaacaaatatagggatattaattagtcgtacaagtttattataaattaataccctaaaaggcgcatagaaaatcaaagtgaggttaccttaggaaaaacgtatatcaataggtgtaggtttctgaccatggtcgtccaagtcaaagggtatgtggcccaaagatggtgacacgtgtaggtgggagagtaaaagataaaactccatattaattttgcagttacatgttaaatgtcataatatttttttgtaaacataagttcaaaaagcactagtttgggtcttattttttacattaaaaaagcatcatcagtcaagattatatattaatttttcagaataaaatattgttaaaattaaattattctaattatttttataaacagttagaaatccaattctcaataaactcacttatacctttactttgaataccaatgtgttgacttaaatatttgaattttttaaacatgtaatattaaaatctcaaaaactgtttgtaaaaataataatattaaaaactaaaaacggtggaagattatatatatatatatatgaaatcacataagaatgatcattttatgtaaaaatgaaaataatcattttcatccgttagattaaaatgaaaaatgaaaattaaaatattttaaattaaaattaaaatctcatttaaccataaaatatctataaaatttattagatcaaaaatcaaatagtttaaagaattaatttacatcaagatcgtcaccattatcgccgcaatcatcatcaccatgatcactgtcatgactattattatcaacaccagcatgattgtcattattgctgctaacactataactgtgatcgccaccatgaccactatcgtcaccaacactattgtcgttgcttccattatcaccattgtcgtgatcgcaatagtgacgacgataatgatgatgatgacgatggtcacataaacgattatagtggtaataattacattgatgatggtaattctaatgatgatgttgacataaattaaatctttgaaatatttaattttctatttgataaatcttataaatattttatagttaaataaaacttcaaaaaatatgtcaaaatcatttttaaaaaccttttaactaattatttcaaccgactcatctttcattaacaaacatgtctgagaaatgtcaaattaatgtttcgaaaagcttttctgcaaaaccagtcacaaatataatcgagtactggaggtctatcactcagaaacctaattctctgggcacgtcaatttctaagttgtgtgtggattggcagatttcgcaattgcctcgtcgtcataaacctttagttagatatatttcttgtcaaaggagattactaatttgcattttttcaatggagtcttaataatttaacaattttcgaatacaaagttaaataatttttaaaataattcaaatctaacaaatattattttcatttaattcttttacacaaaaatttatttatgaagtttttttattttattattcaaattaactcatataattaaaataacggttttgatagaaaaataactaattcaaatgtaatgaacgcatacaagattaaagcagaaaaaaaaaattaatgtatacaagacatctttttacccatttcccttttcgtttaggatcttgaaccattttccttttcatacataatattttttctattacttaaagggggatgataggaggatttgactttcttaatttttttttatttataagaatcaactataaaaattaaaaaatttataataactcactatcttaattaaccaatgaaattagattaatagactttagctctaattgaattgttttaaaaagaaactcttattaaatatatcttaaagaagttaatgattattttaaatatattgaggtataaatgtgtctattaaatctatcataaaggacattaaatattctaaatatggttcctnnnnnnnnnnttcatacataatattttttctattacttaaaggggatgatgggaggatttgactttcttaattttttttatctataagaatcaacgataaaaattaaaaattttataataactcacaatcttaattaaccaatgaaattagattaatagactttagctctaattgaatttctgttttaaaaagaaactcttattaaatatatcttaaagaaattaattattattttaaatatattgaggtataaatgtgtctattaaatctatcataaaagacattaaatattctaaatatggttcctcatatggtagcaattactagtactttcttacgcaataatgagatgttaggaactaaggatattcaaacatttttcagtaatgtttttttatgaactgttaaatgttaatcaattaatcaattattattcgtatttgaaacaaggaatacgaatagttatttacaaataaatagttcatggtctgtaaaaatatagtaatattaaaaaataataatcttttacactgttttttttccatcatttcttgcttcacctttttataacaaaaaattaatccacacacacgcacatcaaatcatactatatattttcttacaatcaaaataaaaaatgtataattattagtaatatccaaactacaaaaagttctaaaatttaaagtatcgaagggcataataatggctacctgtttcagaatgcagaacatgttattgaggaaaaacaaaataataaattaaaaatatatattaaatgagaaaatattatatactaataatataaaattttcacataattatttaatcataatttatatgtacgataaatttgttgacttttaaaatatttattttaaaataattcaagcaaagatttatatatgtataatgttgtaaaactatttatatatacattaaacatattaaattgtgtaaaaacttaaaaaggatagaatgtaatagtagggcttgatgtcggttgaaagttctacagggaaatgataggaatgccgtagctttgagcctttgtccggttcccctctcaacacggaccaaccaatatcattggccccattaaagaaactaagacagacaagtggttttcacttttctgtctttagtcttcctaatgatcgtcatgagagacccacaactactattttaatcacttagattagattaatttcccctattcaattgacttttgttgttgtcccacgctaagagtagataattttagtaaaaaaaatatattcatgaaaggtttggtcgaattgaagagaatgaaatgcatcaacaaaaaaatatttaaattaaaatagagtaagaaaaatataaaattagttttaaattaatagtgaaaatttatcttcaattcctttttagcaaccaaacctatcctaagaaaattatttcaccgttttgaaaaatattatttactcttcccaataaatagatgctagtatctatattatatatatgataaattagaattaaataatttgaaaattaatatttaaattttctatatttaattatatgttttaaacttttaattttgatctttttggacgtacattatacatactattctcacgattagttaaaattatattaaataattttctctttatttatatattttaccttcttgactgcttatatgatagtatatatatctttcaatctaccatttttgtctgtctttaaattgagtttcaataattttttaaaagaaatggttaatacttaaaaaatagtcataactacaattatttattgtaaatgcaaaatatattttatacattcaaatatattaacttatcataaattttaattataatatatctgtatattaaaaatattcatttttttataacttttaattacataaaaatacacgtattagaatactaattaattataatgagtccagtagctatttaaacactttatccaacaaggcattataggtcatcaattacattgtagtcattagttgcatcacataacagatattcatttcatagcttcaatcttacaaagctatctagttctagtgtgaatgaaaagtaggcaaagggaaagaaaatgctttttgtgctcttaatttgattgggcaatggggtttggttattgtgtgaattataagataggataattattactgtagtatttgtcgggtgtttgacagaaatccatgattcatgggcaaaaggttggcaaggtgatatacatgctatttcacatggaaaattactgtcagggaaattgatagaataaggaattagtaactaatgcatgttgatgacctatttacaggtaattaggagccctaacgctttattgcattgtttatagagagagcatttattgatatcaactatcgagttttaatgtttcatttatgtgagttttttgggcatagactatttcatgtctatcttttactacgtgtgatggtacgtaattccatttttttggtgtgctgatgtacatgtactagtgattcctgaagaaacattttttattatcttgatatttttataaacattagatgaaaatcatgtatttaacatttaaaaatattaaaaagtattcaataatattttatatactagctagtacatccctgttaagaaaataaaaattattcatcttgtatatatttctgtaggataatatattttgattccaagtttttttatttttttttatcattgtaatatataagttattgaatacttgattgctctctaaaagagtatttattgctagctattataagacttataaatatttagtaagaaataataattaataaatgcatatataatgagattaacttaagtaaaagacctattacaaaatgtataagatattagtctttataaagtaatgaactacagatgaagcatttttagcagtaatcctatccatatttctttttaaaaaaatattacctaaaatatttgagaatatgtgaaattgtgacttaaatgtatgaggcaacagttttgtgtatgtatattatatatatatatatatatatatatatatagcctaaacgttaaataattgtctaagttgtctatgttgggtttttattttttcactaaagctcaatagggtctagtgtgtaaaaagagtccaagaaatctagagtccattaacatctaagggttaagttttctagaaactcatatatatactacacttaaccctctctaaatagagaggatagtcagaggctgagacaaagtcatttcctgatggtgagaaagtgcccacacactatccctttcccccttgagagatagtttggaaggtatgtcatcaacagattacaaggagatcaattgtgcatggacgcaagaattctaaggtgtgagaaatcatcaaagattagtaccccgagaggtaggggtgttcattaaccgatcaaaaccgatgcaaatcgcggtgaccgaaccgaaaaaccaaataccaaaataatcgaaaaaccgaaaaccgaaaaaaaccaaaaattttcaccggattggattggttttcggattggccggtgaaaactgatccaatccaaaccaatccaattgtaaaccataccttaccctttatctacttgggcctattccccatcatagcccaaaaatcaaaaatccaatacattgttccttattttgtccaatgaacgtgtttgtctaatgaaaattagaaaatgatatttatttttgtccaatgaatgtgtttgtttatgttagatacttcttattttgataaaaaataagtctcataagttttatttttagactttaaaaaaaacgaaaatcgatccaatccaaactgaaaaaaaattggattggattggatcggatttgaaaaaaatttcaaaccgaatggatgatcaaatgaccaaaccgaaggaattggatcggatgattttttgcttcaaaaccaattcaatccagaccgcgaacacccctaccgataggtaatattccttgtatgtttatgaaacaatgatgattcaataaacataccaatatcctaggttcttaaatcgtttccgcataaatccaatagttcctatagcctatccatagtttggaatgtgttgtctaaaatacgtggcagccttgatatatttgtgaccttaatgcttgttgttggagaataattaagtttgaaaataatgtcctagattaggtagaagttatcaagttgaataggatataagtggaaggactaaaacattcattgaatgtcttaaggttttaagttaaagtatgatatcagtttacttgtgtggtgtgtttatggtccattggtgtaaatctcctcattatttacaacactcacacaacaattgatataaaaatcggtgattcgagttagtgtttaggtcgaacaagtataatggagttgacattggatccaggtgtgcatttcttgtaacaaaagtcttccaagacagattgggacaatcacgattaaattttaagggtaaccatttaatactcatggattgaaaatgatgattgagtgcaatgtagggttactactatcacaaattgaataaaaaaagtctaaattcaatttgagtctctaaaataaatttgaactcctataaaatttctactttttggacttttagtgggtttttgtaacctaaacccacaggccacaccaggcattgatcaaatcagattataaatgtttacatataattcgaacttatattttaaagcccaaacctatatttcattgggcgaattgatctgagtaacctattccattttccaccttcgattttagacaacgattctcaagtttatcaaatgacaaataaagatggatgtgacattgtcacacttccttaataacttagcataatttaggattcaatatccaatttatcaattaattttaagaagtaaatagttaatataaaggaacaaaaatcgtatgtaggttaaaatataaagattacaaatataatttatatttttttatgttatttgcgttggctgaatttatttattttttattaagttgtataaagaaattttgagactttaaacaaaattataagaaagatttaacgtatgaacataagaagaataagagagagaatgagattttcaagaaaaaggtagacttaattagcaatttgattcctaaattgtttaaaatatatcaatttgattcctaacttttaaaatgctccaattaagtctttcaattgttaagattgtctcagctaggtcccttctgaccaattgatgaggttaacgctgttaagaacttaaggttacaaattttagcgatttttatctgtaaataaataatgatgatttttaaccaccactatacttattattatttttaaattaaaattttaataaaaaataaaataaaattctaacaaagtggcattttttagcggccactatttgtaacacaccattaaacaacatctttgcaccttaaaaatcagtgtcaaacaacaacaaccaccacgcgaccacaaagagaagacaaacaaacaacatctactccattatcccccatgcgaccaccctctgtgtcgccattatctctagtgtggccaccctttgcacaaccccacccagatccaccaccaatacccattgccgcaccacaaagagaagataaccatgcatcaaagactacagagcatgaatcggtgttggagagagcggcgcaacaaagcaaagatcttctttattgatttagcgccatgcaacaggttcctgatcattttctttgttgtttccttcattgccaccctttgcatcgccaccaaatgtgacccaagatagtcatttggacaagaatacttggaagccgataacatcaaacccttaacaatgttattgtcacacatgccacgcgtacaccaacttaatgtcgttacatcaaacttatagaagacacctaattggagtgttttaaaattttgggaacataattaaaccaaaaaaatattaaagttttgtaaaacaaattgaaaacaaataaacattcaataataatttaaaagaaataaagtgtctcttatttcacctataaattcgaacagttccttgacaattatgtctttctaattaatgttattttatttccttttcaaaaatctctgttttctttttataacgtgcttttttacnnnnnncatatatatatatatatatatatatatatatatatataagtccatctctaataaacaattggatttatatatgaaaattggaataattaacaataaagatgaatcaaattattccaaaaataacttaaaattttacataaaggatcctacttcacataagctagttaattaggtcctcgtttttatcattacatcacaaataccatgacatctcatcacacacacaaagtattatacatcatatatatcatattcattaggattctttcattaggattctaacagcaaattatcacgttttctcctacccaactacgactaagacaattatctattacttttaggttgacctcaagatctagcgaatttagttgttttactatgagtaaaattaggaaagacaccaaaattattttctaatcctaacaactcaacctttactcactaaactcgccacaattatgccaaaattattttctcttttgtcgttgtccgttaatattttgagcacggatttgagggttggatctatttccgaaatagggtggtaatggtgatgatggttggaagagatgacaatttttctagtaaaataaaaatagtgatatttttagctgttattatttaaaattaattgtttttaaagttaaaagttaacccaacattaacgttattaataaataattgaaaatgaccaaaacaattttttaaaaaatataaaaatatcaaaataagactttcaaaacttaatatacaaaaagaaaatactaaaacataaaggattaaaaatgacatttagccaatacttaatattaatatcaaatctaactcaaatgcatttatcaaattatgagtttagtccatgtatacaaatcttaatttcataatcattattgtttttttattgattccaaaattaagatttcatatatcatctccatactatattaaataataatataaaatgcaaaaaaaaattgatggataatgaaaattaaatccttgcataatttattttcctaatttcattctattataagtatatattacacttattcagtgtgaatacaaaatgtgaacctcgttgtcaaaaattgaagttgcctttcataactcctgaattgtatgaatgttcattgtggaaggattggcattggtgatagacacctgcaaacactctctgacaccctagtgagtggagactctagcaaagagttttagttcaaaatgtgcaactaaaacttggtaattgcttcacttttccctcttcccttctcttctgtgcaactaaacatggtggaggctagggtacgtaagcaaaacctatgcgtaacttacgaaggtaataggtaaccgttggatcgattttaattttcatcaaacggttagtattttttttaattttctttttctttgttcattttccctttctaccctttttctgttttctctttcttctctctccgcattcccgtctcccctccggcctcattcccatcgctgccgttgccctctgccactgtcaaccacgacgacaccagcagtaaataaggaccaccactagaacaaaaatagcattacacatggaattgactttggaagggagcacgctttgcaacagtagttcaagtcacaaattggagttgcagacaaatcacaacagtagttcaagtaacttttgaaggacaacgttcctttgggggcgatagagcaaagaatgtaactcacaaattggaactcaaagtcatacgttttcatctctattaagggataattggcaaaaacgggaaaccaactgtggctgggattgggatttggagtcaattttctgaactgcatacagttgatcaccagcacgtcgggggcagatcgccgcttctaccaccaccaacaacctccaccctctctaccgaagccaacaacaacaacagaacctcagaaccgaccttgccaccgtgatcggagaagctactccccagcctcctcccgcctccgccaacaaaggcgtcaagaagaggtcctccgctccctccccaagctcaccaccaccgccgaatccgctgtcaagttcgccgactgcgctgtcaagaatggcaagcgccctatgtatgcgatgcggtgttgttgttgttgggaggaaggtgaagaaagggtagttcgggaaatgcatcagaaaaagaaaaagaaaaaagttaaattaaataaaaattaattgatccaacgatgcagaatgacattcgtaagttacgcttgggtttatattacgtaccctagcctccaccgacatatgcttaattatatagagaagataaaatggttaagtagagtgatgacacgcctgttaggcacatccatcaataactttcatgctggtttctaagcatgaagagacgatcgtgttgaagattgtgctcttggggaaagagatatttattgtttgtactttatcgtgtaagttgatcaggctaacagtaattaattatgcactaataaaaagtgtatgttgagacagtgatgctgaggtggatatatggtataggcttaatggaagaattaagacactagatttttagaaaatagttttttttttcttaatctcttaatatatcgttcaaaatttgacaaaaattaaataaaatttaatcaataattatttgcgtcaagaatattgtcaaattcgaattcaatcttaactttatattaattatttatgtacgatcaattgaatgttgaaagcaatttaaaaaacctcttaattataattgtaattcataagtgaggagcaataaaaagaagattatattagaagaactaaaaagaaaagagaaaacatagaaaaacttgagatagtatgaataaaagatgagcattcaaaaaagaaaagtgtgtaattgagtcaacgtttgcaaaacttatttttaataaaattgattatgattagaattaatttttaattgaaacgatatatatatatatgtaaatacttttattctaaaaacaaattaattgtaaaaattgtgataacaaaatttatttaacgcagaatttatacataaagttacaacttaaataacgtatttagttttacattttagatgtggtttcatatgtttcgaatgtaaatttcagaagctaattaataattatagattttaaatgtgattcctcctcaaaaacttttcaaacaagctaatcaatttacaatagaatcaaacaaaataagcataaaataatcaaacataaaataacttaaaaattctttaaaacataaatatcttaatgttattttaaataagtttaactatacttttgctccttctaataactttttattttagtccagataatttaaagtatcatttttatttctatagttacaaattttcaactctttcgatcctcaacgtctaaaattacctaaagttattacatttaaatcatttaaaactactacaaaaactaaaattatctaaattttttttacatgtaatggtgttagacaagtttaaacaacgagagaataaaaaaggttgaaaatttataactatagaaacctaactaagatattttaaactatgaaactaaaataaataaaaaaatgttgcaactatgggaagaaaagaataattaaacattttaaataactcaacctaaaaattaaaatcaaacatgatccaaatgaaattaaaaaaaaaaaaaaatgaaaccgaaagggtgtagtcagcaaatcaggttccccagcgcacggttgatctgactcaacctgtaacgggagagggggaagagtgtgcacgcagggacagacaagatttgggaattttatggcaaaagcatgagaatgtgggcccccactcatgattgggtcaagcccactttgatcatctggtggggtgccattaggtaccacttgtctccttgtcctctattaactctacccttcattcattttttaataaacttgtaatcctagtgcataacatgtgggcccttcctatctaatttttcatcacacgctgctcataaaattaaaattttaatgaatataaggtgggaaagttaggttcgtcccccatgatgaaaatattacacttaatcagcatttccaaatcatcatacacacaacaataagtagttgatatgagtagtatacgtaaataagatcttaaatctagtcttgtacaaataatctgttttaaaaaataaatttcattaaaaatgattaattattttttataaaaatcttaattattaataaaattaataaatattttgcatgaataaacataataataatgattagtcttcaacctgacctaatggtttgcttatttcaacatcatattattggcctcaggttcaagacatgacaaatcctttagaaccaaaccaacagcatcaataaaataaacctggcaatgaaaaaagtcaccataaacacatataatgaacaaattaatgctctaataaatctatccatccactaaaccgtgttttggatgatgtcggtgcctatgtttttccttctttttttttccttttatgagttaattccttgttttcttatttatgtccctcttcacttttctttttattgcattagccaaacattttctagctggactataatttgggttggggatttggaataaggtaacatgcattatttcatctttgagttagtgtaattaatcaactccaaagtccccccagcattcaacgtaactatcatggatatatatagatgtgtatcacgaccccaaccccaatctcaaatttgcaattatttacgcagacacgtatgtattcaatctggaactttttttattgcgttttctttttcattgccttctcatttttttcacgtttcaaaacaacaattaatcatatccttgaaactatcaaatatgtaacttgaagaaaaccactaaaattggcgtaatgataagatttagaataatatacatgtgttttgagattcaaatctcaatacgattcaaatctaagtgctatcattacaataaaaaaaacatatatcttaaaaatcagcaataactgcttggagcataggttacttaatgctgcatatctccaacccgtcgatcgttgtctgtcttgttggtaccattcgaataaatatcgagtaaaacaccgttactttaatccttatagactaaaagcttttctattaaaaaaaaactctattttcaatagaaaaactttaaaaaatacttaaattttatatccaaataagtcctaaaagatttgtgaatatgtatttcattcatcacattagtctaaaaattgatgtttatttatttaagtgttatataattaacagtggatccacatataaattatagtgcaactacacatcttcacttctaaaaaaattacatataaatatctcggacgtgtgtattttcttttcctaattttgtatattttatttcctttgtctttattttttcatgataataataataattattttaaataaattatcctcctgatttaagatcctagattcatcacgttaatgtacttgtgccatacaatgaagtatccatgtcaacaagaaccaaaattaaaaatattttatttttaaagctctcttttttctttttatctccacatcaatagggatcaaaataaaacattcaataaccaatttctttattaatttctctttattcaaatgacttcttaattgtctcttcttttctctcttcctttctcacaatcactacagcaacacacacatcaatgctatttctctttttctcactttgtcttcattgtctatttcaatcccaagatccaaatggaccatttccacaaagaggaaaaaaagctaatactccgtaacaaaatctagcacaaccaacaatcaaagtagaccaagccacaacatctatatcaagtaacctttcagacaatcttaatgcattgttaacattgtcgagttttatatttaagaaaaaatgtgtttcaacttataggaactaatgttttcctacaccccaaaaacttcttcagttttcaagatcctaagaaacattttttaggattttatgagggggaacttctccagaattgcccatttaatggatccgaggaacatatgagaggagcatatgaaaagggccttttcatggatttcgtaatgtacattacatttgactaattttcaagaaataaaccttagaagataaagaatgagaatagtgcaaagttgattgaaaatcattttgttgctttgtgaacttgattgtttcatttttctattatccttgaaatctgccatgattatgtggaatcacgagaacaatatgttgcactcattgattggctacttgagcattacttgaaataagtggtcacaatatgacatgtggtataaatgggagaaaccatggaggaatgggttaccctttttgaagatgattatcattggttattagtacctattctggagggcttttatgtgtatttctccatgaaggataatagcagccatctgtttagagggatgcaagggaagcatatgttgattcagtgatcgaggccttgagaatgttctcgtctgtaatgtgattgaatctactgaactgcaggcaatggagattgaagaatgttttgtaagtatagtaaatctgtgtacttctagagaaattatgatatcaaatcttgtttgtgcttgtctgcctcctgtttttagcatctattgctgaggctgtattgcatactggtgggatttaagatttgattagtttcattttttggttttgggatgggggagcttcctgaggctgtatgtgcctgattggtttattatttctcttattactgaaaaattgtattgtgtatactaatatatatgatttctcatgtaaatagtgtttgataggaaattactaaaatgaaacttcaaagttctgatgatgtaaataaatttctcattgtatgagaaagtgaaaaaagatgggtttcctctttgatttctttgtagctgggaaatgaatgaacaacaaatttttgcatcttaatttttgcacaagttcatcaaatagttggggaaaagcatacaaatgattatgtgggagtttacacagtaaaattagagtttcttataattgtcttcttttcaccgtaaatatataaaaaactgctcatcatcatgcaatactatattttaccaatataaattataaaagacctccctggacaaccgtgtgtattcgtgtgcgtgtgtgtgtgagagagagagagagagagagaatgtaaaggatttcttgttgatatgatttttgttttcatcatgaggaaattccattattgtggactttggttatgagtttttgcctttatttgtgttttgacctatttggttttgaactagtattctccgtaacagcactatttgcctttttattgatgttttgacctttattgatgtttttgacctgatttgccttcgatgtaacttttggtgcaaaaacaacctatcgtgtataatgtcataataaatatcattaattatttttctttaatgatccttctaaccatggtgttataatttttttaatttaagtagcattttaagaggaagggcagccttggtgcaatggttagaggtgttgccgtctaactagaaggttatagtttcgagtcatgcaatcagcctcgcttgcaaatgctaaataaggttgcctacaatcaatccattatgggtctgacccatcctttccctcgagctttatagtttttagtaccaggttgtcctttttttttcgaagtagttttttaagatctaaacaaataactttgctgtatgtggctcacatgcattctctagaaagccattttcactgaaagctgtctaaaatggagttttactttcaattttgctgtaagcttcacatgttaggcattaaccattgtccttagttcccaatgcattggaaacattatcttcctcacaattctctatcagctttaaactcccccttttctctttctttagaattgataacatgtgaaacaggatatgtcctaaccatttttacgttgtctaaaattagtactactctattacattagtctactcttaattgaattcaagtctaaaatcattgaggcatctatgcagtatgtttggatctttgatattaaatgaggccatattaaatttcagaattagcaaatgacaagagatcatgtgttgaatttgtaacttatccttcataggataagttataagatcaacttgaacatttcctatgtaaaagtaaaatttgcaataagtttagaatatcataatggaagtccaacatatacattggaactaagtttggctctgggctttctacatttcagataaatcttcaaggaaactgagaaaaatgaggccatagacaagaaaataatcttgatgctcaattgctcatcagaagagagatcattaaatgaatgatgatcatgaaaggaaaagtttagatgcaagtaacattgctcggaattatggggcaatgctgagacgttggtaattgagtaggaggctgcagtccatcataatattgtaatgtcaaagaagaaaaacttggtgtgggcttcaagtgagatgtttgggaaacttaaattcaaaaagaaatagaaagaagaggaagaagctaccaacatgaaatcaagatatttggctggaatttgggtcgaccatggtgaaaaagtaactgccatggagaggtaaagaaacagctaagatagaaagggaaagtccagaaaaagctatatgggatgatggagtcaaatattattgatcaacgtcttgttgacttcttttgggacaatttgattatggcttaaatatatttttggttcctatactttatcttgatttttgttttggtccctatacttttaaatgtttgatttgtgatccttatagttttacaaatttaggttttgagtctaatttggataaacttttcaattagttgcaggagaagaaagcaagaaggtaaaatgaattaaaattctctcataagtgaaaatcaactaaagaatgtaacttttatagaaactctctcatctaatttcttctaaagctttaggtgcataagttgtttttaatttatgaaagaagtttaattcatttggtttttctttttcttttttttctcacataagtgcttagaagtttgttcaagtcatacctcggtccttatagtttaattctagtaaggttttggtctctccaatacactgtacattggtcgaaatgattgtaccctccaagacacatgttttggcgttttagcatattactggtagtagcaatgacggagccactcaaaatttttacctcatgccaaattttatttttaaaagtataattttgctagtagtatcaaattttatttttaatccgataattttacttaaattttttttttttttaaaaattaagtagtatcatagtcattgctgatttggccatggctccgtcactgtagtaaagactaaaactgaaatttttaaaactatagggaccaaaccaaaattaaagaaaatcatagggaccaaaaatgtatttaaaccttcaattatattttaagttgctacaactaccattacacagaaatgtgcctgtgttaaagccttgtttggttttgaagaaaagaacccgggaagtagttggatgtgttgcgcctatgcaggaaaaaatggaaacttccctcatttgtttgcagaattggcaatagttgctagaatactgaagggatttgcaaagtaaaaaaaaaaaggttgtcctagttggagaaaaaactacaacccttactattactacttgtacttgaggctctgtttggaacttgggagtgagatttaagctttgtttgggagatggattttggaggggaagggagggaagggaaaggtttatgtagagacatctccttgtttgggaattttaatttttgagggaaagaatttgaggattttcaaaactcctctgaaatcctccaaagccttaaaattgctgtcccccctatttgggggatttttagaaggaaaagtaattaaaattattattataccagtcagtattaataaaattattatcctaccctagtcactgtaaaatatataatgtattaattttttaaataagaaaaaaattgtaaaaatttcttattaactttctatttccccctcttaatatatttttaactcccaaacaaggagaaagaaacttctcttattttcctccctttctttttcctcccttctccttgaatctctttccttcccctcccctcctaactcccaaacaaagtcttagaagggggaaaggaagggtgtttgggacttgggagtgaggtttaggagggggaaaggaagggaatgaaaaggaaaggttttagggaagtttcccttatttgggagttttgaggggggtgggtctggggatttttagaaaccctctacccgtccccttcgtctatgcaatttctaggttcccactttttgggagattttgtagaaaaatataatcaaattactgacccctttcccaactaaatgtctctcaaaccatggcacattctctctcagcactcttgtttggcttcaaagaaaattgtcactgagaaaatcttcacctctctcatcccaacgtatgatttggatgaatccatagcaccaactcgtatttccttcgttcctttgttccatcaagatcatatataacccatagtagttatgtgtctattctttatgtgcccccaccatcacattgtggttgggattaatgaagttgcagcaagtttctctacttcatttcttcgttgttcaggtttactaatcaacgcctttgctccatcaggtatgatatttagttcaaaatgctcattttccaaaaaaaaattgaacattgcaaaattagttcgttatgcttcgaattcagcaatagtaccatttttttttatgaaatagagaattatattggtttagctcctgattatttttacttatttggtctatggtaataaaaaattgaaaaaaaacgtaagctaaatgcttgcaatcaaatgacacactataatttctgttagtggtgttacattgataaagtttggcgggtggaaaaatgtttcaatcatgaaggttacattaattcaagaatgttgcttgctattattaattctttaactgcattaggtgtatctgtaaacgagggtggaaggcttctataccgtcagcaagtaaactaaaatgtgttatgtgtttcaattatgtacatatagatacataaattaatcctcaaaaactagagatggggacttgggggtttattgaataattgcaataattattattaagtgaaatttcctcaaaaactacaatttccattattcaataagataatcaatccccaaatggtgaggacagaaataatctagttctatttataatggaaaaaattgattatttgactaatctttcaatagtgcaaggaggaaaattcaaattaataacaataattgcgtgttgtaactcactaatctttgtttctttaatctgataatgacaggcccgcaccttcaagaatacatggagcattgaatatactgtaattgttccagctgaatgtcacccttggcattctctttgctaaccaagtcattatgctgccaagaagtaattttcttgtgagctccccatttcatgattttgtttgattggttttgtttgcatcaaaccttagggttgattttaagcatcgaaaagtggtaaggtattattaaaagataagtattacatcgaaaatatagaaatgtaagacacgttttcttttctaataaaaccttgctacttttagttgcttaaaattagctccaagggctgatgtaacattttctttgattttttagtacattggaaatgaaaactaatcatgagttaccctgttaaaaacttaagtagatgatgaatggtttagtgagagtggtgctggtcaaaatcataattatcaaaattgatggcctgatcagagttgttcttcatattaatcatatagattctggcaggtaggaaaccaacaaattataaccatttctgtgacttctctcacatactcaaaagcccagcacatgcttgactacttatccagtgttttgagctttcataaggtcatcctatgccctcattgagatttttatttttggtgatttcccttattgagattgttcttacgaattggcaatatcagtcgcagttgataaatagtataccattttgagtgcagtatttttattctctctactttctttgattagccatagtggatgtaacactgaaatgtgatgtctacttgttttggcagcaaactaaagttgatgtcagcctgcaagaccatctctaaaatctaaatcatgcctgtgaaatatgatgtcacgctgaattgcctttagtggctgattgatgaccagaactctacttgtacagccgtacagggcttcacttactttgttgtataggcattgaagttatgaaccaacattgaagttatggagatgtgatgtctacttgtttttgcagcaaactaaagcttatgtatggttagatgtgaatcatgtgatggttaaggtccttgttcggaatgctttgtttaaccgaaaggaaaccattctattggttccaggatataactaataaatatcataataactgttgatatgatttaattatgtaattttttcaacaatatttttgagatatcagatcaaactttaatattataataatcgttaatatgatttaatgttatataatattaatatataattttaatttattttttatttttgtaaattcatactttaataataataataattataataacaacaacttcataatttaaacaataataataatatgatttattaatatttaaaaacaatggtttactattataataccattatcttttgtatatttattaaatatatatatatatatatttaagggaaaaaattcaataaatgcatataagtcacacctaataagatttctaaagaattaaatttgtacccttaattgttaaatttattatatctgttacaaatttatttcttgtgtaactaatgtaaatccttaattcatactttaataataataataagaacaacttcatactttaaataataataataataatatgatttattaatatttaaaaacaagggtttactattataatactattatcttttgtatatttattaaacaatatataagagaaaaatacattcaatgaatgcatataaatcgtaacgaattaaatttatacccttaattgctaaagttatcagatctgttataaattaaatttacaaatttatttcgagtgtaactaatgtaaatccttaatttaagaaatcattattttataggtctaattcatgttacaaatttaagaaatccttatatttacatacgagaaaaagaaaaacataaacaaccaattatcaccatggaatctgttgtttcagattttcagggccttcaaacgaacaattgcaagaatgagaaaattctccttcctcattccgtggccaggaccctgtgattgtcatttacagtgaaaaagttaatcaaaacaggcagaggaggaggatcgagaggagtaggatggaggtcgtgggtctcatcataggcgtagtcgctaagggcaacactgatgttgttgagcgcaaacagagtagttagaatgctagtgaggatgttatgggggcgaggagagcaaaattgacggttctggtggtagttttctccttgtgcagatatgggtttttgagcaccataacattttcatatttggttctttataagcaccatagaattttcataattgggtcaatttctggcaatctaaattgccaaaaaatcgtttgtacttattacaaattaaaagtaattattggcagtttttaaccgggaaaaaaaaacatcatttttgaattatagtgtgtacttattaaaaaaaatttgctcacagtcactctgccactgccacaagggagtgaaaatagagactatgtttacacggccacctggggttcaaatgaaccacaacggtatgattgatgctccagcagctgtccctcgtcgttaagtttcaccaatccttagcggccatccatcccaacaatgtcaccacttcttgtagagcaaattaggttaaagcactcattattaggaatgttgtcagcagacaattgaacaatcttagtccatgacgactgcactttgtattctttaatgatccatatttctactggacgatcacactccatgatacacaggcagagaaattctctaaacacccccaatcacaaaaatgaaagtcacactcaaaacgacaataacatttcctgcatagctaaaagccacccaatagcacgtgtggtgtttatataaggggaatcaatgcccttaattcgtttccatttattgtctctgagtgagaaaaattacctccgtttgtgttataggatgcttgaaaaccaccaagtagtcgtcggttgattggtgatacccaaaaccatagagaaatacgtaaaagtcgaaagtcctttgagaaatacgtgagaaagatatttctttgtgggccctgtggatggattccacacccagagactttcacgacctttcaaaagtataaaaccccgacacgaactaggatttcaatgaaagtgggtatgttgaacagaaagaaaaacttgggccgcagaaaatcaagctttaatacagaagaagctgaaacgtcgtgcattgaaatctacggatccatatgcatcccctaataacacaagtctctctgtggaggatagttcaaaatgtgattttgcgaagtggggatcagagatgagtgaagtcatgacttgcaaacgcatttgaaacggatgagtgacttcaccggcaacctcaacaagatttcagttatcagttgcagtggcagaaccacgctcttattccttccctttacaactttgcgattgcggccgcgtatcttcgctcctttgtgaatgcatatcttcactcctttgccgttgtcattgtctctcttcatttagggtggttggttattctgcagcgtaactcagatatataagtaggacataaaaataaggcaaatcaagtggttcacgggtactagggttgttccggatgccatttcaatctttgtgactttgttcgattagatttgatgattttttatttatttttaatttattatcgtaatttaaaatttactatgtaattattatgctatattattttaaaaataaattttacttttattaatatctgaaaaaaaaattcttttttacttctatttggtattattataaaaaaaacattattagtatttgttgtaagataataataatttttacatcatttgatatttaatattaatttttaataatattggtacatctttttttttattttgtttcaatattttatattaaaatatgaaaaataatatacatctgattataaaataaaagaaatatataaattatttaatacttattattaattattataataaaaatcatatatatatatatatgtattatatctattatatacctattatatatttattatacgatttaaatttaattatttcactctcatacattcatttcatatgatatgtcatctctctttatatatatatatatatatatatttgtatcatatattatttatctatctacattatatatnnnnnnnnnnnnnnnnnnnnnnnnnnnnnnnnnnnnnnnnnnnnnnnnnnnnnnnnnnnnnnnnnnnnnnnnnnnnnnnnnnnnnnnnnnnnnnnnnnnnnnnnnnnnnnnnnnnnnnnnnnnnnnnnnnnnnnnnnnnnnnnnnnnnnnnnnnnnnnnnnnnnnnnnnnnnnnnnnnnnnnnnnnnnnnnnnnnnnnnnnnnnnnnnnnnnnnnnnnnnnnnnnnnnnnnnnnnnnnnnnnnnnnnnnnnnnnnnnnnnnnnnnnnnnnnnnnnnnnnnnnnnnnnnnnnnnnnnnnnnnnnnnnnnnnnnnnnnnnnnnnnnnnnnnnnnnnnnnnnnnnnnnnnnnnnnnnnnnnnnnnnnnnnnnnnnnnnnnnnnnnnnnnnnnnnnnnnnnnnnnnnnnnnnnnnnnnnnnnnnnnnnnnnnnnnnnnnnnnnnnnnnnnnnnnnnnnnnnnnnnnnnnnnnnnnnnnnnnnnnnnnnnnnnnnnnnnnnnnnnnnnnnnnnnnnnnaaacaactttaaaaaaatgaaagtcaaaaggaaacatgcaagaaattactttagtaaagaagatcctacctaagacaagactctcagtaataataattgtttggaccacttgcgtatataaaatataggctaaaatgagattttgtcctcctatttttttaaatttatatatttttaattgagacatttcatttctcatttttaaagaatttactattttagtttttcatttttttaattgagatatttagtctttcacttaaaaaaaaaaaccagaatgctaataattgtaactaattttaaacgttaatttttttgtattttataaatattgacagattatgattgttatacacatgacaaatattttttaaaattatttaattgttaataagtttaatttattaaaaattaaaaatacacagtcaataagtctaaaattaattaagagaactaaaatcacaaaatttttaagtgtgagacaaaatatctcaattaaaaataaaagaactaaaattataaatttgatgaaaatagaggactaaatatctcaattaaaaaataaggagactaaaatagtaaatttaaaaaataaaaagacaaaactgacattttaatctaaaatatatttaaatttaaactaaaaaaattaataattcaaattcaaataatataaaaaaattactactacaaattataaaatataaattgatcatcacttagcgaacgtgggcctcagcctatactttggtccaagcccaacatcagagagtcctcgccctctttttttcagcccgccatcatccccataaataaataaatttccctccttcactgccctgatgcactataagaagcagtcgctggatattctttttagggttttcataccccttgttagccaccttgcataatttttgttgttacataaaatttccatatttgtgtgtgtttgtgtttacttgttgatgatgatgagggctgaggcatataggggagagcagtgtttaactatggctctgaaaaacctgtaggtgttctacagggtgccctgccattcaagcccttcacataaaaatatatggcatcatagtacggatttcgtgctttgtgggtggtttttggatttgagattttggtcctgggaatggccttgccttcctttgcccaatttcactcttcctttccttcctactacttttcttcacaaatccgcctccaaacgccattacaattacaatacaacccccaactattttatttttgagttcaaccctaagttatattttggtattaagtgaattttaaaaatacgtttcttttgttaaattttctaatgattttatattattttatgagttgtttatgttcttgttgatgggtcaatactcaatgcacagtatttaacctaatttcctttaaattttgaatttacgcaatctggacctgggctgattccttgttcttgattgctgatgcacttgaatagagatttagtgttgcaaattagtggtgaaagaacgtagattagggcttttttatagtttaccaataatattggaaattattagttggaataatggtgagccatctctttgcccaagttggatattgtatttgatgtgttcatattgattactcatcatttaagtgctccaatccaacccgtgggcgttaaacatgtttattgatctctgatcaatggcttcttgccatttgtaaattggacaacatgaactgtaaggatgttctattgattattttaaaatttatttggacaatatgacttaaaccaaaggatgtatgtgggtagctttgacaagtgataccctctgactcttcccaaaaatcaaaatcagtcctatttgaaccatgtgtttgccaatgttagtgcttcaggtgaaattttgatcaattaactcagatgctattacttcaagttggcttttgaaacatgatatccatggatatcaaaatcgtgatttaaatcgcaaactcgtacaattctactgagtctattatccttctgcgagttaaattggaagcaaattcgattttggagtagaatcgtacgagtctacagtagaatcggacaattccaagcaaactcatgagttgacgagtctacactataacaaaacggcactgtctaacgcgagctaggtagtaattttcccctctttgctgtgtgagtttcgtgattgcgtattcctcagctttgtgtgccatgtgcaaggctgcgagctgctctgtcgtcgacttcctgcgttgtcgctgctctgtcgtcctggtaagtttgtgttcttcaattgtgacctggaaattttgcccctttcttgggtagggaccatgatgcctgtaagattggtccttcttattcaccgaaaaagcaatggaacattgcggaaaggcagaagccattgctttacttggagtcaacactaaaaacaaaaacagtggtagtcctttgatccacggttttcgcaagcattcctttgatcctttttttttattatgaattatggagaatttttattttattttcttattcgttagatttttttatcatgaatcacagaatcagtgttgtgtggaattttgtatttatgttttcttatttcttcagaatttttgccaaccctgcaaaattccgtgttgttacttgttcaaggtagcatattcaaatggaaatagttatgaattacaaattgtgtagtgaaagctgcatcaaagactatggcaatgcaattgctagccttttaatcaatagcaaaccatgttttaacaaggagtttaattttcatgcagtgtaaagagttttaagggtgaaacaggagaaattattacatggttaaggactgctacattcatggtccccattagtttctacataatccgaaaactgagttatgaaaaaaaacaacctgtgtaattgatgttgctgtagttgactaagagaaccatttcaccgtggaaatcaacaatagcttttctgattttagccatcttctctctataatcttctacctcactaaagagagtttttttgaattgtgttgcatatattttggcaaacaaaatgttatgaagcatgtcaattaaatgcaacgcatgcatactttggaaagcagctgtttaattttttttaagtaatgtaagtacacatgttctttttgctggtgcatgttcatcctcgattgtatctcacattagttaactgttaactggacagctgtgtgtactctgtgaataatgtgatgttttcctcatatttggtccgaagttgcttctgaatttctctgctaaatatagtaaaccttatttcagcctttttttctacttgagttagctcacgttgtaaataatcggctttgatacttctaaacttatgatgctcaatatatttttatttgatttagtagctcctgagttagctcactctttttaacaggcagcaacatctcctatatatatttatgtgatgtttctgaatgaaattatatataggtaatttattttttttttttttgtctgaagtagactcttacgattttgaattgagtttattaggtcttcatgagtctgcatagaatcacaattttgacaaccttgatgatacccaatttttaaaaattaagaaaataaaaattgtgatggccaattgatgaaatgtgcttcatagcatagctttcacaagtactgttaatttggagagggccagatttagtggaatttctcatgttgatccaatcaattactctaaaattccaatcatagcatagcttgcacgtttctcatagtgaaactactactgtagcttccgtagaatagaagaatgtcagataagtcctttttagttttggcgacattcatatacaacatttttttacaagtagaacaaagaaaagtgtgaagtaaaaccggcgacacaattgaaagagacgataaaaagtgaattataaaaaaatagtgtagaaagtttgtataaaaacaacttaataaataataacaagtaaaaaatgttgtttgaagaatttttttggacactgtaggacgcatagtatggtgtttccactgagttagtcttgtaatgtggtagaagagagaaaaatatatacacaaggggtgacacattaaaaaaatgatattcaaaaatcttatacaaataacataactcagcaaaataacaaacctcattacaacttctataataataagcaagcatttcacttgtataacatcattgatagagttcttgtttagatagtctaggctttggaataacaactaataatttcattttcttgacaacaccaccaaatttgcctgaaaattcaagaacttcaccactaggtaatctccacccaaaagaatgtaagaaggaagctagcataaacatcatcttcttccgaaaccaaaaggaagatactcaaatttgttgccccccgagtagtccaacttgccagcataactcagaaacctctccagttgaaattccaatgcatcttcccaaatgtctgggtccctatgtatagtccacacattcaacatgtgcaccctttggaatggcgtatccaccaacagtgctagtttgactcgggcaacgaggaatcagaaaggggagaggaggatgcaaacatagtgtttcctttatgacagcttctattggacaactgggattctaattcaatacaattgtccaatcctactacgtcgtccaattcttcttgaactctcttcattgcctcaggatgctgtagcaacgttgctaccacccattctaatgttgatgtggtctcggttccacttaccactatatcatatatatatataaacaaggctgtaatttcacatacttggattggtgtcacaaggtccagtacgaaattttactaactaagtatatcctcatatgcaagacgaaatatatgaaatgtgagttttcgtgagtaaaaaatattgatcaagacacaatacatctacttggtcaagagatacccaaaaaagatgtttttagatacttgggatcaatgttgcaaaaaggtggtgaaattgatgaggatgtaaatcatagaattagggcaaggtggatgaaataacggagtgcatcaggggttttgtgtgatccaaaattctccttaagctgaaaggaaaattctatagaacagctgtaagaccgactgctatatggagcggaatgttggctagcacattggcaacatgagcataaaataggagtagcagaaatgaggatgttaagatgaacgtatagatatacgaagatggataagataaaaaatgaggatattcgacgaaaggtatcagtagtaccggtatatgaaaagatgagggagcatagattgaagtgatttggacacgttatgatacgaccactggatgcttccgtaagaacaagagtttgctaccaagagctcgacacaaagagaggcagaggtcgaccgaaacttacttgaaaaaaggtagttaaacaaaacctaatggagtgtgatatagattggcggatgctatgtcttaggacggagtggagaaaagttataagcttggtggagggttaaacccattagtagttttatgtttcagtcattctcttgttttagttcttttcctcttcttttcttctttcttcttttcacccatttttctctcttctgtcttatttccacttttttcttcccctctctctttctctttgtctcatttctgatgtatcattggttcatctaccaccgattccaattaacttggattaaaaatgttgttaattttgacgttgatctaagtatatgctcatataaggggtttgctaaatgctgatataccctcaattgtccctgcctcctgttacgaagattgtgttcatataaaagtggcatatgggtaggaatttatttctcaattacctactttttcaattgagtttctagattaatttatatagtatgtttcctactatcattgtacattcttttatattatacaaccgaatgctttaaagaattttcacaatctatcataatattttattttcaggcctcaccagtataagtggcaatttatgtattcaaatgactgaaaatgggatttggatgttctttgtgatcttgcatgatgggtgatgaaataagtagtttgcagagggaaattcaatgcaagagaaacttggcattgaaaattcactcaactaaggaatctaaggatccaaatccccccaagatgaaatcaaggttttacactaggactgctattttggtcgaaggattttgggatctccacaatggtattgtgattgcaattgaggttgcatttatctttaaaattttgcaatatcaagcatagtgatgaaaccacaattgtgaccacaatttaaaaccctaaatcaaatttatgataattatgacccgagtgataattttgaaaaagttatagaggttgaagtaggaaacatactatgaggatggccttgatcttgttcatggtcattgatgctgaatcactatcactcttggtaagctccaacagatattgcaggacatctttcttctttgacttactttctcccttccctgtcacattcattcgctttacgatggcagaatcaaagaccctatcaatccagtgggagacctttcttgttcttctctcaattccttgcaaatccaagcaggctagcgtggggtaaagatccgaaacattcggcttacctaataacaccaatagttctgaacaaattctctaaacttagccccaatagcattcccttctccttgcaaagtctcacctcaaatcatatttgctattgcatttgtagttgttagaaaggctaattcaccaacacttatggcacaccctattttcttctcataaacatctttaagtgatttcataacctccacctttctatgatagaaagagttactgatgttggagttgctgagcatctcgcgcatcaatatcttgcgagccttcctccaccgcagaccatgaggcaaaaaggctatgtcagtgccaccatacaaggccaccaatccagaaatgggagggtcatggttgacgaacacggtgtcttggtcatgcattatctctttcacaagagagggtgagctaaccacaatgaattaatgtttttgttaccaacatgagcttgtagataggaccataaacttgtgcaagcttgtgaaatttgaggtggggattggttcctaggaagggaaggtacccaagaagtggcaagcctagcggacctggaggcaaagcagatgaaaaggtggcttcattgcttgaattcttgaaccatcttagcaaacatagcacactgatcaacgtgactagaatggttagaattgtatgcaagttggtggaatcccaacaccacaaatatggcaatgtgacacaaaatgaactcaacagcattctggattctgcagggtgaactaccttgtcttttctagttatttttgcttagttaacctttgattgagtgattttagatccagggagcaagttttggatagtttcttgcagccgttaattgaatggcccattattaatagttaggtgtcttagattgtacgttaatggtgcacgtgatttaatgaaaaattagtccttaaactatatatgtaatttaatattaaattgatcatcgaaaaatataatttattgtaaattgatttttaaatataaatttaacaacataaatatttatcatctttcaagtaactaaatttgaatttttttatttttcaatgatcaatttgtcaacgtctcacaatttatgaatttgattatttatttaaaaaataaaaataaaaaatccctcgccctaacatgttttgtatttctttttgttttttagaatagaattgcagcccatcgcttattagccatccatagccatcaataagctcatagggtcaaacactaatataaacaatgcacgctcacacgcatagacctccctttcgggagatttcatgataaggactttttttttttttggttaattagtatttgggatcgattttaaatttttaactaaaaggggatatgtcataacatttgttatgatttttttaaacatactactttaaagacataaaaattcttacgacattaaagtcgatttttttttaataaatatttcgacttcaaaatcataaatatttttacgactttgaagtggtgacgattttctttttaaaattgtaaaatttgttttttttaatggtaaacaaaattggtaatttttttaaaaattttaaataattttttaatttaaatatttaataaataaatatagaaaatatagaaaatttattaaataaaataatatattaaaaattaggtatatcaaaaattaagaaaatattaaataaaatcataaaaatatttaaaaaatatattaaatatcactttcattctcttagaagcgaagatcaatgacctcaatatttggatccatattttatgtttgatccttcaaaatgacaacagaccttgggaaggtcaaccactactcctatacataataaaatggatgaaccaattccaaataggcttagaattgaaggacataatcgttgtaactgtctatataaagaagtgaaagactaatattatttataatttttatgtttttatttaatttgtattgttcattttatattaattacaaatgttgtttttattttaacaactacttttattactaaattataatttatagataatatttaaataactgttaaaataaaatttattcacattaatgtaccaaatatttaatctttttaataataattaaaaaataattaacaaaatctaaatacaattaaatattatttgatgtattataagttaatataaaaataatttaatattttcatttaagtttaagtcttttaaaataaaaatcttaacattaatacaaaaatataaaatatattaaataaaataatatagtcaaacttaaatataccaaaaaccataatagtattaaatgaaattatataaaaatttaagtctatatttttctaattaaatttaaaactatttataattaaaaaaatttcaacctttttttttaaaataaaaaccttgaagtcataatattataaaataaaataaaaaatttacaacttagtaaaaaaatttattatgtttttaaaaaaattatattgggtcataagtttaaaaaaattaaaaaaatatataaattgtagacagtgtgacaactgtattactgttataatttatctctttttttgtttaaaaatttaaaattcaccttcgaaaaaataccgacagtaaatgtgactttaacaacattttttttttctcgagagggggtaaataatttccatatttaccatttaggggctgttccatttttattaaccagtgtggggtaagtcgtgctacatggcacgacttgtaccttgtcagtcgatttttttttttgtttttttaaaagtaaagtcgaatatttttttacgattttcacttaaaagttgaaaaaattgctacaacttttaagtcataaatataaaaatgattttaaagtcgtttttataattacaacttttgatcgtgaacttgtgctccagctttatatatatatatatatataattgatttattttatatgtttatttaatatttgtttttgttattaatttttacgaaattttaattttatataaatatattaattactagtttaaactcatatatatatgatttttttaaattacttttgtttgttaatttaatttgttttgcttttaataattgtaaaaggtattgagttaatttttcacgtaattaattataaaatggaaaaaattagtttaattttattatttaattattaaaattaccatttattaaattgatttaacattttgcatatatttaattattaataattacacacttttttaatatgctcattgcttacttattttgaattaaatttaatatttcaattaattctataaattgttgtactaatgttaaaattgaaatttgtagagatttattgtttgatgaaaatagtttgataataaatttaacttataaaatatgaattaggctatatttattttcattttgtttattaattttgcctattgtcataatgttaattaatcatttgggatactaatgttgatataaaagaataattgttatattaacacagaatataaattaagtaataacagtagtcaaatattttaaaaaataaagagcgttaaataaaaatgagaaagtaaagaaaagtaaaaaagtacaaataatattagttgttaacttccttgtatggatagttacgacgattgtgtccttcagttctacataatgagcatttttttggtctatttaaaattggttcgtccaccttgttatatatacgagtagtgactgaccttcccaatgtatttcgtcattttgaataatcagacataaaatatggattcaaatattgaggccaattttcttcgcttccaagggaatgaaaattatgttgataaactttgcaaatgttctccaacttgtaaacaggaacaacaaagtcatcgtaatttaagttgtaagatgcacacgctgcaattgcatgcgagcatggaatttgaaaagcttggaaatgtccacactgacacgaccattcgttcaacttgacagtgcatgtcattgctcgttgcccatgtcacgtattagcaatttcatgaacctcaaactcacctgtttcccgaacgtacatgcgaacgtaatgcaaggttgcaatacgttgattttcttgcagcatgacatacacatcttcagagtacctatgtcttgcctttatcatattcataaatttcatcccattagtaacaaatgaatcatttattttattaaatgtttcattgaccaaggcagtaataggcaatgcttgggctcctttcaaaacaaaatgcatgcattcggcaaggttagtagtcatatgcacacaccgtttgccttcatcatatgcccgagtccattgacttttggggatttggtccaaccaatctggtgcaatggcagtcaacaaagtaccatgatattttccagttaaaaatgttccatctacctgcataattgacttgcaatatttgaagccttcaatgcatggcttaaaagtccaaaatacacgattaaggatcactttagaagagtcatgttcaacatcctccattgaagtggatgttttgtatctaacaattgtactaggcacaaagtgggtaacaacagccatccacacaggcaaataactatatgattgttcccaatttccaaaaatcatttctacaactttttgttttgttgtctaagcttttttgtatgacacaatatacccaaatcgttgtaaagtatctggaactaaagttttgatttggataccaggatttgttttcactaactgcataatgttatgagcaatgatggtggagtctaacctaacacgatcttgtgatatttgtgaacttgtgcaactgtgcataccacttatttttttcatctcccaccttatgcgtattttactgaacgatgctcttgccctccaatgacatccattaccatactgactacacctaacaacacacttgtcactcttgctctcaaccacatgaaaattatatgactatacaaaatgaatttctttaatcgcattggcagctgctagtttggattcaaatatcataccttcatgaaggtcatttgtgccccaagtctctctattgttaaatggattcgagtattctaaatcttccgagagttggctattgattgtttgtgtcgtgtcatggcttgctgatccactctcgtcatcattattgggttttaagtcgtcactaaaatcgctcacattatctctgatgaatggttcttcgttattcatatctaaaaaacatggaataatttgttagtaatgaaaatcattaagttggtttcatgtcaaaaccatcataacataaaacatgtacatgaagtttgtaaagaaaaagttattgccaaaagataacaacaagcttgtgcaatgtttgatatgcttagaaggtgatgttaagtgaacaatttcaccacttatatatgtaccttattgtttaccatgaatacttttaatttgtttatactgtagtacttttgttgaatgacacgactagtcatatttcaattgtagtatacaactttattttaaagttttgaatagttgtaattcagtcaacatggccatgctttaatcttgtaaaataacttttgttgaatgataacatacaatggtatatatgtcgaactagacgatatatatcgcgtgaagggacacccattattcagttataactttactcttgtaatttgaataaattatttattattatcaatatagatttctaacttcacaattcttaatttacagtcccatgctgggtatcaccaccatcaatcacatgttgaacccaatatacctctggtgcatgtttctagatttatgccccactatcatcaaacacctgcacaacctttttatccataagtgggtttctctggatacatgcctcatggttatgaacaaagttcacaaccatttgggttctcaacatatgtgcctcaacaattatttcaagttccttctacatcaaatatttctgaaggaccctcacataggtttggtaccactttcaacactccgccatcagcatataatccatcaccatcggcatctttttatcgttcatcattacctactcaaacgcgtgacatgggtaatgacgatgacgataatgatgatgatgacgataacaatactatcaatgatgataatgatgatgatgatgaccacgacgatgatcatgttcctcactaacaacaaagacaaacacatgatcatcctaaaacaagaggaggaagaggtggtagaacaagaagaacaaatccagtgcaacaagaagaaagatcaagacgcgtatctagaagacctcattttggaacctcatcccactattaaattttttttctttatgtgtaatttatttgaattttatttcataatcctaagtctttcaaattatatcttgtgttaatatttcaaattttgttacacaattatatttgttctaattaattaataaaatcaacataaatattttttcattcagaacaagcaaatattattaccaaaatattttaatttaacaaaatcaacataaaaaattattaacaaattttataaaatacataatacttgtaatattaataactaaaatatttaataaaatcatctaaaaatacatgatggttttttctaattatttgaaaatctactattatattatatatatatatatagggttacgctcattgcagcaaatacttagaatgaaattaaaataaagtaagtgctctaaagtcgtaaatacctttacgacttttaaatgcatttaaaaaaaaataaagttacatgaacaatgactggtgcaactttaaagtcagacttatgtttacgactttaagttaaattttgaaaaaaaaaataattaatagaaagagcaaacactaaagttggaaaaaaatattcgactttactttaaaaaaaaatcgaaaaaaaaaatcgaccaacacttttaagtagaagttgtgtcatgtgacactgcttatctcatacttgttaataaaaatgggagaacccttaaatactaaatatgaaaattatttacccgtcctagataaaaagccctttaacaacctctttcaggttcaccattaagatttaagaccctactattcctctgcttctgtttcttccatttcccactctcaacttcatcagaaccaacccattcattccccaaagaagccttccccaacaaacatggttaccttccaatcagccccacttccacttcttcaattttctacgctttctatgaaaccaaaactcaactttacctctctcccaaaccccacttctcatatggctccaagttggccctggctgctcctccatgattggaaacttgtacgaacttgtatcctggcgtgtcactgaatcactcaccattcaacccaaccctgatacatggaattttggtcttctttttcttgatagtcccattggaactggcttcagtgtggcctcaacgagagaagaaattccaactgatcaaaacggcgttgcaaaacatctttttgctgctacaacaagctttcttcagcttgatcctgttttcaagaattgccctatttatattactggtgaaagctatgctgggaagtatgtgcccgctattgggtattacatattagagaaaaatgcaaacttgaaggtttctgaaagagtgaatttggctggtgtggctattggggatggcttaactgatcctgaaactcaagtggctactcatgctctgaaggcttattgtgttggattgatcaatgagaggcaaaaggatgagttggagaaggctcaattggaagcggttcggttgactcaaatgaggacttgtcgtgaagcaactgatgcaagaaacaaagtcttgagaatgttgcaaaacatgacagggttggctactttgtatgactatacaaggaaggctccttatgaggatgatttggttcaaaaattcttgaacattgctgaggtgaagaaggccttgggtgaatgaattgtttgtgtatgaaatatgcagcgatgttgtaggggctgcattgcatgctgatgtgatgaagagtgtgaaatataaggtggattacttgtgagaaggagcaaggtgttgttatatcaagggcaacatgatttgaggattggtgtgatgcaagtagaggcttgggtgaagacaatgaaatgggaagggattgtggagtctatgaatgctgaaaggaagatatggaaggttaatggagagcttgcagggtatgtacaaaattggaagtctctaaccaatgttgtggttttgggagctgggcatctttgcctgctgatcagcctgttaattctcaatcaatgacaggagattgggttttggagaggggtttgttcaaaaacatgctgcaggaaaatgtgtccagagagtctacatatgttggttaacaattcagaggtattcttcttggcattaaccttgcttggtcgagagggtataggatgataagagtagattcggactctccggtggctattaatctggtgacaaaaggttgttgcatgcttcacccttatttcaaccatgttaaggagattcatgcagtccattcctatgagggtgatgttacttggagacatattcttcgagaatctaatcaagttgcgaagcaagctgttatagctttgattccgtttcaagtttttaatttccccctaggtgtattgtcaatgtgttgagagctgatattgctcacgttagtttccccaaagggttctaggcttttagcctttgtaattcaccaaaaaaaaatgtattttaagaaccgctagaagacacaatgaagtccacagcatcctggattctgcaggggcaactacctcccttgtgtttgctatttttttttttttcttaattaacctatgattgactgattgcagatttcatcatgtcaagttagaacgttacttgaactttaccatgcatcaaaggagtgaagtgccaatccaaaagtcaacacaagacaaacccagaaaaagaagatccaaggagaatgctgtggtcatagatccccgcaatttaacatgaagcaacttgatagatgcacagtggatcacatttttctgatgatgggggaaacaaaacaacagaatacaaacagaaacaactctaggacctcaaggatgagaatcccattacatcagctgagacaatattaaacaaagctgctggacaatgatgaaaaagctgcaaatcatggtttgaggccaagtcttgttttgcaagccaatctgcagtgaagtttccttctctagacttgttgaaaagagagctcccaagccaaagttctaaaatgctgaatcttgatgatcaaaccactgtaaagatgataaggattatcattcttcaaaacgagatcaatagccatttgagagtcagattcacaaataatcttatgaatgtcatgatgccaagcagtttctaagcctttaagaatgccgaataattctgcatgaagagaagtagtagttccagaagaacctgtgtaaccaatgatccatctccctagacaatcacaggtaaccaatgaccacatttatttaccattagatatattattaattaatttaatgatttagattctaaatttttaaaaattgttaaaaagatccttccttaatccttagttcctttatctctcatgcttcacactttaacagcacatacgccagtaccacacgctcctctgctcccctcgaacaaaacattctcagcaaacccaaaactctcaggtgcaagattcacaccttagaaaggactcatcttttcattttgtcaaagtgaagatggaattccgtactggagcatggagcattgctccatcatgttgcaaattgagaggcatgattgtaatacttataagaggaatatatttcttttcttatatagatctcaagagtgcaaacacttcatattaacatcctttgttttcctttgtctttttcttcttattaatcatatcactttaacacatttatttatttattctttattttctcttatatttctttcccattcttcactttagagaggccaaatctaacatatccacttaatattttcctacatataatgagtttcttatataattggcaaactaaagattcccttacaccaactacatatatatttaatcaaaataagttaaatttcaaatttagtgtagttgatacataatctaattgatagatttaacttgcaccgaaatgtggaatatattgactcttctacactcatgtatgacatctgtgtgggtgcagattcacaattgcatttggaacccaggttgttagaaaagttacacaatctagccattaggacctagtttagctatatatggtgtacatgaatttggtaaactgtgaagcatgcaagggaattgagagcttttttcaactttttaaaagtctgtatatagagagacgaagagagatcaagttattccaagaataactcttttaaagttattttctattctcaccatttattttcttgagatctaatgattgtaatgagtagctagtcttaaccattagatttcaaggaaatgaatgatgagaatgagaaataactctgttaaagttactcttggagtaacttgatcactctttatatatgtgggtggtgtgtgtgtgccggtgcaagaatcatctatcaatataggttctatttacatatttttagtcatgaatatttctgtgaggattcattttctgctgcaacatttgccacaaccctgttaagatttgtcagtgtatataagtttctagggagctagctacggtggcttttccttatatatttcattcaacttcagaaaaaaaaaaaaattccttatcatgtataataaagtcaaatttgcgaagaaaaaaattaaacctgctcacaaagtgcttaacaatacaagtttcacattgattccttaaccatgaatacactaacaaatttcatataaccaatgattaatcttagccttacaaaacaaatacagactcacttgatacatttttcttatgcgcattttcaaacactcccctttccaaaacccaatcttctatcattgcttgagaattaagaggctgatcagtaggcaaaagatgcccagcacccaaaaccacaacattggtgagagacttccaattttgaacataccctgcaagctctccattaaccttccatatcttcctttcagcattcacaaactccacaatcccttcccatttcattgtcttcacccaaacctctgtttgaaccacaccatccctcaaatcatgttgcccttgatataacaacaccttgctccttctcaccaagtaatccaccannnnnnnnnntttaaaatataaattacgcgttaaaaatattcattcattatagattttaattaaaatataatttaatattaaaataaatatttattataaattttaattgagtaaaataaaccttcattatgtacattatccagactaaaaattgctaattctctatgaatttgtttgtgtttaaatttaaacaaataaaattatgatcatttctattttgttttatatattgccatattaattgtcacctatcacatcctatttggtactatctaaatatctaaatacggtgataatttagttggttcacaattcacgtatcaaaatatctcagatctatatagagtacagactcagactgtttgttgattacaaatataaaatataaaacactttcctttacagagcagattatttggcaaactcgagttctcttttattctaaacatggaattgaacaactgtaattttctttttgaatttcnnnnnnnnnnagtcaaatttgcgaagaaaaaaattaaacctgctcacaaagtgcttaacaatacaagtttcacattgattccttaaccatgaatacactaacaaatttcatataaccaatgattaatcttagccttacaaaacaaatacagactcacttgatacatttttcttatgcgcattttcaaacactcccctttccaaaacccaatcttctatcattgcttgagaattaagaggctgatcagtaggcaaaagatgcccagcacccaaaaccacaacattggtgagagacttccaattttgaacataccctgcaagctctccattaaccttccatatcttcctttcagcattcacaaactccacaatcccttcccatttcattgtcttcacccaaacctctgtttgaaccacaccatccctcaaatcatgttgcccttgatataacaacaccttgctccttctcaccaagtaatccaccatatatttcatactcttcatcacatcagcatgcaatgcagccccaacaacatcgctgcatatctcatacacaaacgattcattcacccccaaggcctttttcacctcagcaatgctcaagaatttttcaaccaaatcatcctcataaggagccttccttgtatagtcatacaaagtagccaaccctgtcatgttttgcaacattctcaagactttgtttcttgcatcagttgcttcactccaattcctcatttgcgtcaaccgaaccgcttccaattgagccttctccaactcatccttttgcctctcattgatcaatccaacataataagcattcagagcatgagtagccacttgagtttcagggtcagttaagccatccccaatagccacaccagccaaattcactcttttagaaaccttcaagtttgcatttttctccaatatgtaatacccaatagcgggcacatacttcccagcatagctttcaccagtaatataaatagggcgattcttgaaaacaggatcaagctgaagaaagcttgttatagcagcaaaaaggtgttttgcaacgccgttttgatcagttggaatttcttctctcgttgaggccacactgaagccagttccaatgggactatcaagaaaaagaaggccaaagattctattccaagcaccagggttgggttgaagggtgagtgattcggtgactcgccacggtccaagttcgtacaagtttccaatcatggaggaacagccagggccaccttggagccatatgagaagtggggtttgtgagagttgtaaagttgagttctgggcttcatagaaagcgtagaaaatggaagaagttgaagtggggcttattggaaggtaaccatgtttgttggggagggcttctttggggaatgaatgatttgattctgatgaagttgagagtggtaagtgaaaggaacagatgcagaggaatggaagggtcttaagggtgaaagagatgatagatgccatggatttgtgcagagtaatgtttgaccgtggtgagagcttatatattaaatttaatagtttttttagacacgagggatttttttatttattgatttcttactcgtcctcctcctcctccttgttgttgcgagaatcttgggagttctaggaagaaagaagaaatatatttaggcagggatcacgagggagataaatttttaatataatttgtgaaccatgtttatttttcctttgaggatatacctatactactttttgttgataagtgaaaactgaaaagcatttttcttttcaaatctcacagtattatttttctcacttatttttatgattacataccagtgaaagtgtcagcaaaggtcataattttggtaatcaagggtgtcagttgttaccctaactttttcctcttttttcttatttttaattatttaatcaattttatattttcaataatttgttattataaaaattaataaatttatcataatgataatttttattagatgataatttaaatattttttactcttcaatgtataaactatttgctcatacataacacatactccatccgttctacttttgttatattcattaaaattagctaaaaaaaatagaaacctaaaagctaactagaaactaaaaaactagttagaagcttaaagctagctaaaaatttaaagttgaaaaattaatttattgaaatatttgacaaaattagttattgaagtgattgaaaaatgtaaaaagacacaaaaataataataccgttattcattttaaaaacaaataaaataaatacatatatcgaggataaaaatgaaaaaaaaattaaaaaaatattatttcaagtattattttaaagaatgctagaacctattaagaaattactaattttttttaccaaacaaccaaatgaattttttgactagtaaaaaaaactagaaattaatatcttgtcaaacataacctttatatgacattttagcaacaaaaaaaaaattaaaattagttgttcttttagaaaatcaattacacattaaatatatttttccatggagtacttttagtgggagtagttattattgaatagtaaataagaaaaatgtctaactatttagagaaataaataatatattagtaagtaaaataaaatattttatgaaattcaaaatattaattgtatttcttaatatatgtgtcaaaatcttaaacgttataaaaaaaaatggagcacaaggagtaataatatataaaatatatataatagtcatggtaagtaagtgatagagatcaagtgacaacggggtaagtcagaggcgaatttgatcttcccatctgcaaaaaacaaagtagatttggatttgattttataaaggatgaaggcaaaaatacgaaactcaactctatcattatttgattttatcaggttcgaggaaacccacaggaaactcatgttacactttttaaaatttatttgttcatatatatttaaaatatattataaattaaattattagttatattttaattcaaacacatttagcaatataatacggaaataaaaattgtaaatacgagtatcatacttcaagtagtcgacaatattgctaaccaatatttataagaactattaaagaatcaatacaataagaatacttaagaattaaattatatttttatttcaatctataatttttgactctcttatttaattagtattacaattataatattatatagttaattattaaaacaattattctatattttaatgtttataaaaataaaaataattacataattttataactaataattataatatatattaaaagaattatatataaaagtataattatattataaataattacaaataaagaatgaggcgggtacgaggcagggagtaacatacctgacctcgatcccactttccgacttcccaaacttgatcaaagcaagtttttccatcaaagttggggggaggttgaatggatacccatgagttcgattttttttttttttttaatttgtcatgcctatcaagaaaggcctccaagaagagaagaaagacctaagaggaagaagcttttaattggcctaaaagaaattgtcaaataaagagcttagatggatgacctcgtgattaggctgtaataccaataagaggatgagtaaagagttcaaagaaaaatttagaggttatcaacacattatgttcaagcctaaaatgggagaagagagtccataatggtgcatatgaaagattgacaaccaaataatgcaccaacatgggcctagaacctaattttcgtttcattttatttatttgttttcggaccaattttaatagtaataaattggttgatttggtgctaattaagagcccaagttttcatagatgtagttttacgtaagtagtaatttgggacttgagtttgcttggctcttttgtttatgtttcttaaagttaaggttagccaccaaccttattagaagatgtgtgctgcctaggatttctataagtaagaatgtaattccactcattttggaagttgaataatatttgaggtttattccatagggagcgtgagtagagtaatgattactctttttgatttctagattagaatcttttttgaattttatcaaagtttttcatatctttgtagcgatttaccgcacgacttatatatcactctcctagagtgtgatgccttcctttccttctcttgtttatgccatttttttatttcttttcttatttcaaccatcttgttcttattggcactattgatataattaattgctttgttgttttgcgttaaaactctttttctaccccatctcttatctttgtctcaatttgtgttacaagataactaattcaagaaggatttgtaaaacaatatatgacttctattgaatatcatattaataagattttgaaagtaattattacaaataataacgaaaaagaacannnnnnnnnnnnnnnnnnnnnnnnnnnnnnnnnnnnnnnnnnnnnnnnnnnnnnnnnnnnnnnnnnnnnnnnnnnnnnnnnnnnnnnnnnnnnnnnnnnnnnnnnnnnnnnnnnnnnnnnnnnnnnnnnnnnnnnnnnnnnnnnnnnnnnnnnntttatcataatgataatttttattagatgataatttaaatattttttactcttcaatgtataaactatttgctcatacataacacatactccatccgttctacttttgttatattcattaaaattagctaaaaaaaatagaaacctaaaagctaactagaaactaaaaaactagttagaagcttaaagctagctaaaaatttaaagttgaaaaattaatttattgaaatatttgacaaaattagttattgaagtgattgaaaaatgtaaaaagacacaaaaataataataccgttattcattttaaaaacaaataaaataaatacatatatcgaggataaaaatgaaaaaaaaattaaaaaaatattatttcaagtattattttaaagaatgctagaacctattaagaaattactaattttttttaccaaacaaccaaatgaattttttgactagtaaaaaaaactagaaattaatatcttgtcaaacataacctttatatgacattttagcaacaaaaaaaaaattaaaattagttgttcttttagaaaatcaattacacattaaatatatttttccatggagtacttttagtgggagtagttattattgaatagtaannnnnnnnnnttaaaatataaattacgcgttaaaaatattcattcattatagattttaattaaaatataatttaatattaaaataaatatttattataaattttaattgagtaaaataaaccttcattatgtacattatccagactaaaaattgctaattctctatgaatttgtttgtgtttaaatttaaacaaataaaattatgatcatttctattttgttttatatattgccatattaattgtcacctatcacatcctatttggtactatctaaatatctaaatacggtgataatttagttggttcacaattcacgtatcaaaatatctcagatctatatagagtacagactcagactgtttgttgattacaaatataaaatataaaacactttcctttacagagcagattatttggcaaactcgagttctcttttattctaaacatggaattgaacaactgtaattttctttttgaatttcgctggatttggacaactaaaggctaaattcaagtaactcaatccgaataaaatcactttcaccaaatttgaatgccactatattcttatatatttgaacacgaaattccaagtacccgagtctacaaatcaagactaatgactccctacaaattcttctttattcactgtcatgtacacttgaaatttgataataagtttaattaattcttttttatttctagaattataataactttatttttttatttttacagtttaaatttgaagtatattattttagtttttataattatatttttaatttttaattattatcatttaaaatcatctaataacgttattacattcaaaatcattaaaattactgcaaggtgataaaacgctaaaaaagataatttgaaactataaaaatcgaaaagagatattttaaattataaaattaagaaaatagtaatatttaccaaaagaataattaaggattaattattaatttagtccttaatttattttaaataatttatatttaatttctaaattttaaaagatttaatttgattcaaatttatggaataaattgattattttttatgaatttaaggattgaacttttaaaaatttaagtataaaattgatttattttaaataacttaaggaacattttgaatcttttaaaaatttgagaatgaaattaaataattttaagtattttgaagactaaattaataattaagcggaatatttttgttgaagaaattaagccgaataattaaaccctgataataaaataaaaacaaataagcgtcagataacaataaaataaaacacacgccgccaactataattacattaaccatcaccacacacacattcagagtaatcagaaacacaactaagaaaccaatccaaaccaatctgcggtgttcaaaagaacctccactacccaccatcacatgtcacgtcgcccccacgcaccgccgcagccgccgccgcggctactctacaagcagcagtcgtggtcgccggacatgctccgcgacgaggcgtggcagcggcggaaggacaacaaccaccccgtgaaccgccgccaccaccggctgagcaagagcctctcggaggacgacttggacgaactgaaggcgtgcttcgagctcgggttcgggttcgattcgcccgaaatcgacccgaaactgtcaaacacaatcccggctttggagttgtaccatgccgttaacaaacagtacaaccaccacagcttgtctaggtcatcttcttcgtcttcccttgtctccgaaagcgacactactagccccaccactattttcaatccaggtagttcttgttcaaaaattcaaaattttttgaattgatttttagattttgttgttaattcaattattactgtgatcataaataaacaagattttaattgcgatacgatcctaattgcgatcgcatacagttaaaaaaatttgttgcgactttaatcacagtcgcagaatataaaaccttgatcacgtatttttcatcagcgctgtgccagttaaaattatggattttttttttctatatgaccattttcttaggaaaaaagattgtacaaatttgattgtatgattaaattattaagttaattttaagtttggtgttgtcaatttgattaaattttgagagcatgtggtgcgtgtttgctgacagccttaacattttagtggcgctttgtgctgtagaattagacatgtctacttattctattattttttctcagattttttttttttttaaatttgataatatgattaaattattaggtttattttaagatgggtattactgttgtcattttgagtggatgtggttattattgtgaaggggatgatttggctgcgaagaagactcgtttgaagcaatgggcacaggtggttgcttgttcggtgcgggaatcttcttcatcttcgtgttcaaacccttccgaccaagttaattaacagtttttgaatacctcagacttgtacctgaagcccgcaggaacaagaccagtgtgaattaaattggactctaatttgttcatagatgatagtctttggtggtttcttctgagttttttttctttttttttcttaagatttattatttatatatttcgaaatctgttgtttactaatgtaatatatatgttgtgttaatttgagttcttttgcaattgactagttggtgattcttttcaatataattaacattgatgtgttttattgttcatgtaattcatattttgtcttggatatgttttttattttttaatgtttggtagatattcacgcaagtcactaacccaataatcggttgcgttaaaaatatttttcttttcctttttttctttctcatttggaataaatttctcatatgaaaagagaagtaaggaaaaaaaagagaagtatttagaaagtattgaaagcttttaaagttttcaagacattaattaaatgtatttaattttaatactttcccttttatttaatgttttcttcataaatcataaaatatgaagatttgaaggagtataaaatattactcttgggcttaatctttcttgttttgagataactcttggcttagtgtattcctttattgaatgtagatataaaatgtcaaatattgtcaagttatgattaatttcaatcaaactcaacctaatccaattagactcgtttatgtatgaacaatattatacttaatgagtctcaacactctctttccccaaatgtattatgggaaccccctccactgcttccctcggtcaagtgacgcacttccctcaattatggtttagacgtgatgcggacaaaggtaagtgaggttggggtgtggtgtgggtgtttcggcttctgcatagtgatgtgatgttgggggtgtggtgttccaaatgagggatccacaaaattttctttagcggggacaagaaataatttataatatttttacaaaataaaaataatgtaagattatccacaccatgaaaatgagaagtgtagggagcaagtatggaagtgtagacagtaaatgtcttagtatatcaactttgtagtgggttctatttttttaactcgacctaatccataatatataattaaatttattattatatataaattaattattaaataaaaaacacattaatttgtatttatagttaacataattcattaaattattaaattaaactatccatgattttttaaattgttgtttttatctctatcttgattttatttatgttttctaatgctaatagtctaatacaatattttatttctatttaaaacaaaatattgtattaatattgaaactattaattctactagccaaatattgtcacaattggatatcttttgagtacatttagtcattatataattataaagctttagacaaaaataaattattgttctaacaagttttaatttttataaaataaaaaatagtttttaaatatagaatccaatcaacacaattcgacccaactcatttatgatttggttgatttggatcgggtctattataaaattgtacaaattcaactcaaatcgagcagtaaaaatttattcaaatgtgtaacagatttagttaaattcaacccaacctaatttgtgaacataacttgactagaaaaaacattatctttccttaagggtgatatgaggatacatgtttttgaactttatgaatcatcactaacaaacattaaaatcaaacataaaaaatgttaggcggtaaaaaaaaaaaataatttaggtgggtgaatcaaaactattgtataaaaaaatatttaagccttaaatttttttaatatataaatgtaaatagttttaattaacattttagttttcataatataaatctcttttagatttagtccctcaataaagttctcgacagttacttatttttatatgttttattttgataatgttatttataataaacagtaacacaatactatttagcaagcataatttttaagatttattatttatatttcatattttgttattaactaatataatttaagtttaaaatatatttttaattcttatatttttgttaaatcttatttttagtctttgaattttcatttcatgcaaattatctctaaaattaataaaaaaatatgtttttagtccctgaactgactttttaatttttacatcttttaacttcaagttatgatgagggattaaaaaaatattttttataaagttcaaaaactaaactatatgatgtgaaaattcgaaaactaaaaattaaaatttaacaaaaatataaatattaaaaacacattttattctaatttgaatatagatgttactaaatacatttccagactcaaacatcagttgcgctaatctgacttcttttgcaagtggctttatgtccgagaggctgagagtttaggctagctggtggactggttggtgatttttttttttccatatagttgatatgaaacattatgtgctttatcgttcatgtaattcatattttatcttcattttgtgttttaatgtaagttagatgttcattcaaatcattgacacattaattggttgaactaaaaacaagagaaaggaaaataggaaaagaaacagaattttttttttttccctttctattctctcatttggaacatgaaaagaaaatataaatcttaatttaaaatatataatatcagaaagtttactatattttatcttcacacaggacaaattgggattccgtgttttgtttgctacaataaatttactatatttagttttctgagtaaatagatctaataatgcaagtaattttgtattcctgtaaatctgcaataagagaccgatatttaccctgtaatctcgcatcccaactttaattcatcattgtatttgtagctgtaaagagaaagcagctgtgatctttccttataatgttagcaaggtatttccacagcaaaacattaatcattataaataataaattcaaaattgtcaaatgaaaaaattaaacctacttacaagacttataaattgcttaacaatacttttatttattttttacttttattcattcacagcaactggaaccatgacatatatatatatatatgtatatataattcatgatgaatctcaatagttacttaataaatatcgacttagatacattttcatcctgcacacttttaaacaaacccctttccaaaacccaatcttctatcattttttgagaattaacaggctgatcaaaaggcaaaacatggccagcacccaaaaccacaacattggttagagacttccaattttgaacataccctgcaagctctccattaaccttccatatttttctttcagaattcagaaactccacaatcccttcccacttcactgtcttcacccaaacctctgtttgaaccacaccatccctcaaatcatgctgaccttgatataacaacaccttgctcctactcaacaagtattccaccatatatttcacacttttcatcacatcagcatgtaatacatccccaacaacatcactgcatgactcatacacaaatgattcattgatccccaaggccttcttcacctcagcaatgttcaagaatttttcaaccaaatcatcctcataaggaaccttccttgtatagtcatacaaagtagccaaccctgtcatgttttgcaacattgtcaagactttgtttcttgcatctgttgcttcagtccaattccccacctggactaacctaactgcttccaattgagccttctccaactcacccttttgcctctcattgatcaatccaacataataagcattcaaagcatgagtagccacttgagtttcagggtcagttaaaccatccccaatagccacaccagccaaattcactctttcaaaaacttccaactgtgcatttgtcttcaatatgtaataccctattgcaggcacatactttccagcatagctttctccagtaatataaatagggcgatggttgaaagcaggatcaagctgaacaaaccttgttatagcagcaaaaaggtgctttgcaacagtgttttgatcttttgggatctcttctggggttgaggccacactgaagccagttccaatgggattatcaagaaaaagaaggccaaagattttattccaagcaccagggttggattgaagggtgagtgattcggtgacgcgccacggtccaagttcatacaagtttccaagcattgaggagcagccagggccaccttggagccatatgagaagtggggtttgtgagagtggtaaagttgagttctgggcttcatagaaagcgtagaaaatggaagaagttgaagtggggcttattggaaggtaaccatgtttgttggggagggcttctttggggaatagatgggttgattttgaaaaagctgagactgaaagagtgcttagaaagaagcagaaacagaagcagaagaagactggtgtcttgaatttgatgaagaggaatgcgtggggtggctccatctatggatgagatacaagttccaaagctgagtatgggagaaaattgatggatttggatacaaagaagaattctgaagttaaccatcaacaagaggatcacatctcatgcctcaccttcagcaagctggtacgaagaagaatccaaataacttttggaaacattttctttttatggtaaagtttttaagtatagccaaagtagtgttaaaagaaagttataaatattattttattttggtattttttcatttttgatttctgtaaatttatttttttaattttagtttctataagttgtttttttcaattttaatccttatcagtttatatatatatatatatatatatatattaattttaatcttttaaaattcaatttttattgatagtccttataagttgacgtttagatagataaaaattaaaaaatagaaactttagaagaattaaaaaataaatataatatattacggagaacaaaattctaaaagcgtaaacttaaatagataattttttttataaagaacaaaacaaaaatacaaacttacgagaataaaaaaatatatttaagcatgccaaatgttaaccaaatccttcatgtctcctttgtatagttgtctaagagtgtttttagtgtagattttaaattaaaattttagataattttttgtgaatcatgatacaatttaagattgaagatctattaatatatgtaacatttttttattgatatattctaaattaaaatcttagataattttaataggtttcacgtggattccacttttaaatatttaaaatttaatttaattaattaataaagtatgaaaaatatatgaatattaataaaatatataattaattttaagtaattaattttaaatttaaatttaatttaatttatttttttcttttttnnnnnnnnnnnnnnnnnnnnnnnnnnnnnnnnnnnnnnnnnnnnnnnnnnnnnnngatcttcaaaattcttgaaaaagaacataatctctaaatatagatcagcaatggatggatatgaaaaaaaaaagatcttcaactaaaaatctctttttaagatatcccaaattgctctaattaataaaaacttttggaatatacaaagtccaaaggttgttaaaatgtcatattcagtttggtccttgaagctggaaaaagtcagcgagttgttcttaagacataggtttaatgaaatttcctaattaaataacactggcttggttagagctcttcactgttttgaaattgtgagaaatgcatcgaacaagcttaagttaaaattagaaatatttataaggggaaaaaattacaaaaggaaaaatgaaataactttttctttataagttaaaatttatttttacaaaattaaaataattttttggaaaaaccaaattaaagagattttgtaaattaatttatacacaagttaatattaacttttcaaaaattattttattttctataaatatttactgaaaagtttattcaagcaaaatgaaaagtgtcgaaacccctaaatatgtctagtaaaatcttctctttatcttttgaaaaatgtttgatggacatccacggacaatattattattcaacacatttatgatataatagaaagaaatagaaaaaattaaaaatattaataaagtatttaatatagtaaaatattcatgtatctttatttttatgttcatgctcccctagaagttccataacttaaactctactcattctgcattggcgcctaaggctttaggaaaaactgaactcaataaagctaggaaaatctcaactattctaccactaaaataactaaaatcataaatgatggcataccttgaatagttgaaggaaatagcctcactaaggtagctctagggtattcgtgagagcgttgaatgggtgcataagattgacgagaaaggccaagtgttgatgaaattctatgaagcgattggttgttctagtaatgtggtaaggactatgaagggaaggtgacttttttaactccaaaaataaatacacgtgattaccttgttgaccttcttcttaatcacaagataagtcaattgattgttaatattattattttattacgtgatacaagaaatatttaatctttaaagtctaaaaaaaatactaaaataaagaaaaacatcatattttactggatcaaaagctatttaatcctaaactttctgtcacttccatattaagcaatcggatactagtccatttttgtttcttgttgcaaaacagagtaatcttgtatagccgcaggcataaacaacaacaaaaaaatgtatcgattttaatatacccaccccaaatggacatccacttttacgttaacaccggccttttgaaagattgtttcgttaaaggaagtaaggctaaggaatttgttttagcaatagtctggtgacatttaaaactatttttgcttttacaagtaattttgagttctgatataaaattggaaactctccatagctaagtcgtgcactaataatcacatagaattatagagagaaaaaaaaaatattaaacctgctaggccattcatctctggactatgatgacagataagtgagataacttttttatttgaaccaactatgacagataacttattcactgggaaaaagagttcttgcaatgagattcttaaacctcatcaattaataacctcactctcactcacggtttaatgtcgctagtttcactacgaatacaacgaagtgaaatttcttgaaacattttcctgttatttaaacaaacccctttccaaaacccaatcttctatcattttttgagaattaataggctgatcagttggcaaaagatgaccagcccccaaaaccacaacattggtgagagacttccaattttgaacataccctgcaagctttccattaaccttccatatttttctttcagaattcagaaactccacaatcccttcccatttcactgtcttcacccaaacctctgtttgtaccacaccatccctcaaatcatgctgaccttgatataacaacaccttgctcctactcaataagtattccaccatatatttcacacttttcatcacatcatcatgtaatacatccccaacaacatcactgcatgactcatacacaaatgattcattgatccccaaggccttcttcacttcagcaatgttcaagaatttttcaaccaaatcatcctcataaggaaccttccttgtatagtcatacaaagtagccaaccctgtcatgttttgcaacattctcaagactttgtttcttgcatcagttgcttcactccaattccccatctgggccaatctaactgcttccaattgcgctttcaccaactcattcttctgcctcaaattgatcaatccaacataataagcattcacagcatgactaaccacttgagtttcggggtcggttaatccatccccaatagccacaccagccaaattcactctttcagaaacattcaagtttgcatttttctctaatatatagtacccaattgcaggcacatacttcccagcatagctttcaccagtaatataaatagggtgattcttgaaaagggggtcaagttgaacaaacctggttatagcagcaaaaagatgctttgcaacgccgttttgatccgttggaatttcttgtctagttgaggccacactgaggccagttccaatgggattgtcaaggaaaagaaggccaaagattctattccaagcaccagggttgggttgaagggtgagcgattcggtgacgcgccacggtccaagttcatacaagtttccaatcatggaggagcagccagggccaccttggagccaaatgagaagtggagtttgagagagaggtaaagttgagttctgtgcttcatagaaagcgtagaaaatggaagaagttgaagtggtgcttattggaaggtaaccatgctttgttgggaatgcttctttggggagtgaattggttgattttgaagaagctgagactaagagagggcatagaaagaagcagaagtagaaaaaggcatggtttttgatgaaggggtacttgtgggtcgttgactccattatctactagtatatatttgagtatatgcactctgtagcgtaatataagagctgaactaatagctatactttggtaaaaaagttgggtttggataccaacaagaaacataacaaaaccgtgttgatgaatggcattgaagaagccgaagaagataagtgcttttcaggtatagggaggtgggtgtcgttgacaacatatatgtgtagtgtgtatgcaatgactaggtgtcggctaccaccaactaacgttctttttaattaaatactagtgatagtgataattcatttttaaaaatgaaaatatctttaatcatcggatttttattgaataatctctaaacataattcacattaattctatatgtcttatttatctttctcgtgtgaatttcttgtttagtattaagcaatttcaactgaaaatatataatcgaaccgaagaaaaaggttcacattaaattttcatataataaaagtcttaatttaaataaggataaatgatatttttaaccgtttaaataagataaatgaccaaagtgattttagtttttaaaataaagaattattttgagcaaaataaataagataaaagattaaaatgatcatttaaccatttaataataaagtagatttgaaacgtcactgggatgnnnnnnnnnnnnnnnnnnnnnnnnnnnnnnnnnnnnnnnnnnnnnnnnnnnnnnnnnnnnnnnnnnnnnnnnnnnnnnnnnnnnnnnnnnnnnnnnnnnnnnnnnnnnnnnnnnnnnnnnnnnnnnnnnnnnnnnnnnnnnnnnnnnnnnnnnnnnnnnnnnnnnnnnnnnnnnnnnnnnnnnnnnnnnnnnnnnnnnnnnnnnnnnnnnnngaccaatatatgttgctacagttaagccaatttggtgtaaagtacatcaaatatttttcagaatcatcaatatatgcagcaacttctgttcttaactaaatgaaggtgcacatgagctaagtcaattaatatgtaaggtatgcatatgatatgaacctgagttaaggtaaaaataaaatagaatccaaagagtgaaactataactcaatttcacatatgcaaattcaaatgttttcaccaaatagaatcaaatgatttcaacaaaatgcaaattcatatatatatatatatatagcaaccgacttctagtatttgacagagaaaccaacttatatctagcagctcatcatcatcatcttcattgcaatcacaggtcctcctcttctttatagcctttttttctcctactttttactctaacagaagaactgcaatcaaaaccagaacaaacatgtcagtatttctattgtatctcctttctgattcagctcaagtaactcaaagttggaattcattttcagaaaccctttgcccatagttcaaatatagctgtagataaagggggaaaacaggagacttaacaaaacagtacatgaccaggtttcatcataatattcttcaaattactcgacaagttctcaaagtaaaacttacttaaggctatagaggctgtgaacaatcaaatccaataattaactcacctacaaaaacaaatggaattcactttcttcagtatcactcaagcatttacttcgttaagcaaaaaatggaattcacacaagctgttattataagcaaccaatttctgtactgcagaatcaacaccctccttatcagtatgatgacaatttatttacaatgccaggacctgagatcatgtgagcatttactatatgagcccaatccaatatacgagagacccctctgagataatggaataaaaagtcatattgaatgcagaaatagataagattaagaggaagccagaaaaagattcaatgatagttgagcagtcttacccttcatattgcatggtcattgtgttgccaatttcagcaaatttacgattctcaaagactaagaagttatttttttctgcaatcttcagtaaaataaagcatatattagaccaactagaccagaaatgtaaaagattgcctgaaacttatcacaaacaatgcttgcagtacaaaacacccttatcattggttaaaggcaggaattggcatcatgcttgaataaactaaagcaaatcttctagtgtgctactgtcaataatatcagaaaccaaaaggtttcttgtactatcctgtgaaggaaaaaaggcatatagacaaaggagagcatcttttagcactataccgagagaagattagagccaaaatcagcagtaaaatctggaaaaatatcaacatgagtcttcagcaagcatatctcaggtccaatctgaaagagaaaaccttttcaattagttaaaagaaaatatatgatcatgaccaatcttctaattagaatccagttgatgttaataagccagagaacacaggattctttcatgtatataagcaagaaaacaaaattaccaagttctaagtaagaaaatacattgcaagctgatgatccaagtgaacaaaatagcacttgttcctaaaaaagatatcagaactaccttctcagcatttttcaagcaattcagttgcagttccaacatcagcagccaaacacatattactctccttctcagccattatctcaaacaacctctttccaattggacagcttagccctctccccaaatgacaaagctttgaccttagttacaggctgtaactaagttttacaggcttctccacctatcccaaagcagcaaccttactattatcctctaagaatttcgtaacaaccctaccatctcttcatcaagcttcccatgattgctaaaaaattccacccttggcatatagtgaaatgatgcagatcataaagttgtgtagtaacgtagtcccagtcagctttctaaacatgcagcttcaagtgttcattttaaatacgaatttcaataggtaaaccaaatatagaggcagactctaccttgagaggtcagagtccttaggtttgttcagaagcacatctacactatccagagctcctcctccaaagacacctctacctaaacttagtgaaaacatcaagaagctcatgttctattgttagtgattatttattactcttctgcctatgccatttgatttcctagatagtttgtttaattgacatgtaatcagtggatatagcatgtgcaagatatatattactggagcatataaaaaaattgaagacatgtaaccttggatttaatctaaccaaaaaaaaaaaaaaaaatctccatttaaaggccaaagtgcaggctaatcagaatgctnnnnnnnnnnnnnnnnnnnnnnnnnnnnnnnnnnnnnnnnnnnnnnnnnnnnnntatagcatgtgcaagatatatattactggagcatataaaaaaattgaagacatgtaaccttgcattttatctaaccaaaaaaaaaatctccatttaaaggccaaagtgcaggctaatcagaatgctcttcaaacagtatatttctttctcgttcaattgtgacattcataagaatattagtataattttataactcttgttaaagctgagttacttctgaaggttttgagttcagttcagttacattttagcccttggattctacttactatttttatggttttttggtttgcttctaaacatattgacaagtaaaaactttccatatttatattcacttgtgagcaaaatgtatggttttccaagtgatgtctacttcttccaatgtgcaaattttatgtacgctttagatggattctaacaaattcatatatgtgaataaacaactggtttggcactggcagagacaaaaaaatagtttcaacaaaggacaaagtagttgtcgattcctcatacaatctataatcttcaattttcagatataggtagttgtgcatccgtgcatgcagctttaacttattaccctaacaaacgtgaactactcctggtacaaaaactagtctcaaaaacgattttacataactgtaaaaatgacttcagctaagcacagtagtaaagaaatgaagtcaagtaaaaggaaactaagattttttctttcatatatctacttttattttgttaatcttctcattacattgtgcaccgtaaaatctgtaatgtaccaaacctgaacaaattaaaagagaaaaacaaccaatggatgaaaatggtcgtaccatatagattctaaaagagcgttgcggatcttgttgagaatgaatataatacttaatcaaccaaaacatgtattaaccaaatatatgtcatcaattcactattgagcaaacaaatttcattttgtttctgaacctttcacctaaaattatcattcaacaatccaaatgcatttaggacaggcaactcttatccttccttgtccgttaactcggagaaagggaggtctaaacacatatgaccagattcatttattttatatatacaaagaagcgcaaaactcaatagttagcatgttttcaacacacacaaacacaccatcttgtgcctgttcatcaagccatgaataacaagtgcctaaatttttttgtcaatggaaatcctcagcagctttattgttcctcatcaaaaaataaggacatggagtcagctgaattccaattatggttgtcaaagactcacctttgtagataggttcttctaaaatgaaactaactagttaagattaggagcttctttgacatttcaggaacatgacccatttggaataattacgagttttttaattttcaaatgtaatttttaaaataaaaagtcgataaaaatgaagttgaaaatttttttaactcatttttaaaacatttttacattcattattaaaccaagaatttctttccatgaatatgattttaggttttgaaaacacacacacactccctacatttaacaataacccttcctagtgtcattgttgtcatcaccatcatcgacagcacaaccaccaaaattgtcacctccacaatcaccaatattgttgttatcactattgtcattgctattgttgctgccgccatcggcaccaccaccatcattgccatccacttgcgaaacaactattttggggtcttttttttttgttaattatcatttgggagttcgttttgaattattacccaaaagggggtaagtcttaacatttgatacgacttctaaactaaaagtcattctcgatgtcatgacttctattttttttaactgaagtcttaaaatattttaagacttcatttattttattttaaatttatgacttgaaaattgtaggattaatttttcttactactttaaagttgttaaagtttttttttaaattgtaaataactttttaatatattttctatattttttatatggttttatttaatattttcttaatttttggtatattattttttctatatttaattttatatcaatattatctatattttttgtatattgttttatttaatatattttctataaggaccctcatttctgtgccttcatgaggtgttttagtctagaattgatggttagcaggtgaaaatagcagaattaagccgaacagaaggtaccgcgccaacaagcctatgtactaccgggagtacataggctaattctacatgtggcgctaagagcgtcagagtggcgccaagagcgccacaggtgctggaaactggcgccaagagcgccagagtggcgccacaggtgctgaaaactggcgccaagagcgccggagtggcgccaggggtgccagatgcactggactttggcgccatcagcgccaaggtggcgccaagggcgccgcatgtcggtcaggggcactatataaggccaaaaactcgaaaaagatgggaaaattagcttcttcttcctccttggacctccaatctccattaatggctgttccaagctttttgggaccctatatctaggcctaatcacctccctatgacctttaatccctagagaaacctttgaaagcttgaacccttcaatttctgctcttgaaaaacccctttgagtgaggagtgatttctcagaggaaacactcagagaacttgagattggcgaggacccacgacgtataaaggacgctaaagcttgaggaagctttcctgaggtcttttgagtcgtcactgaggtaagatactcaagtttctccgtttaattttaatcctgggggttttatgaatagtgacccatatgagctggggctagaattagcccagggtcctgttgagagatgtgttcagagcgatgaattgatgaaggaatagctttcagtttttgatttagataactttggattttggctctgtggtggcatgtgtaaattatgttgagtcacttgatatgagacatgccagagccttactgatgggcttgttgcgcctgagagggccagggtaacggtgtcctgtgatgtgaaccgttcaagcccaagaaaccctgagagtttgggttgagagagctttgatgctcactggtgatggcttggtttgagtctggaatgactctgaggccatggttgatctgtgatagaccactgagagtctatggannnnnnnnnnnnnnnnnnnnnnnnnnnnnnnnnnnnnnnnnnnnnnnnnnnnnnnnnnnnnnnnnnnnnnnnnnnnnnnnnnnnnnnnnnnnnnnnnnnnnnnnnnnnnnnnnnnnnnnnnnnnnnnnnnnnnnnnnnnnnnnnnnnnnnnnnnnnnnnnnnnnnnnnnnnnnnnnnnnnnnnnnnnnnnnnnnnnnnnnnnnnnnnnnnnnnnnnnnnnnnnnnnnnnnnnnnnnnnnnnnctcttgtttaccacccaagtgggtgacgaatgcatgccttgcttgattatatatatatatatatatatatatatatatatatatattatgcatgctatggaatgaaaggccaaagtggcctgtttgattaattatatgtgttggaagccggaagggctttaagaacggtacttagagtggaactcagactgttctaaaaagatgaaccctaggatagacactgaaacagtgtgagggttatgagacacctgatatggcaggtgtgaggctgtgggccttttgagagaatgcagatcatgagatggtctgtgatgaaacctagaggatactggatgagtatcaggctagttgaggttccctagccagaggtagagtttgaggactccctggaatagctgagattccttgggaggtgccactgctctccacctaagtcctaaggacagatggaactgtgtgaatgttcctccttaggcaaagatgttggaagtcctgagtgattatcctcaggccagtgtgtgtgaaagtcctggaggtgattgccctatatggatgttcttgcccaggcatgtgttatgaaagtcctggaggattttaccaggccagatgataggcagatatgttgtatctctaagagagggcttcccgaggggggattagagcctagggcctcttagatgagccatatatgtattctcaaagtcctgagtggagggatctcctcaggcaatgtttgtatggttagaggcggtgcctctctggtatggaaagtgtctagtgagagacactatgataggtacctctgttagatgtctgtgagacaggctatgagagcctagatgagatattgatgccatgatgatgactttgatctctgtgagacggctgagagagccaagatgaggtggaatacctctgatgctgagagcatccagttatggacccagatggctgggatgtgtgaaagttaggatattgtcctagtctttgtatgtgtgagctaggaggatttcctcagctctgtttatatgttgtgtttatgcttggtggtgaaccagggttagggaggattcccagaaccctgagcttactgagaagtttgtctcaccctgtgtggggtttgtgattttcaggtgcttcttgaggagaggagctacctcagggcaggaggccctagtgacctgataggttggatgggaggctgcagtagaagaccagagcagaacttcaagtgttgaagctggtcttatatctctgtgtagttgtagggtatgtgtatacccatttcctgtacatattataatgtatgacccagctgtggtcttgttttttagcatgtatatgtacagatgatgaggatgtatatatgtatgtttcttcctgatcgtctctgtatgattatgttgtgtatctgcctatagtgttgttatgttttatctggatcagcaggggcatgttttatgttctttttatatatggtttttatattccattcataatgtaatcaagataaacgattctatcgcttccgcaccgcgcttagttaacgctgatagcgtgttatgtatatcattgatgataacatgccggagacgtccggggtgttacattttctatattaaaaaaataatacaaaagacttaaatttaaatgaaaatattaaaatgtgttgttatcaaatattgaggtactttatcttcgcttataaaggaatgaaagtgatgctgataaactttgtaaatatttttcaacttgtatacaagatcaacaaagtcatcataatttaaattgaagaagcacgcgctccaattgcatgtgggtaaggaattcaaagtgcctgaaattctccacaatcatagtcattcattcaatttgccagtgcatgtgattgctcattgtgcaagtcgtgtatttacaattttctgaacctcaaactcccctacttcttgaacatacatacgaacataatgcgttttttttttatttttaatattatttgatattataagttaatattagcaacaaaataaataataatccttaagattagtaaaataatatagaaatattaaataaaacaatatacaaaaaatatagataatattgaaataaaattaaatatagaaagtatattaaataaaataatatagcaaaaatgcagaaaatattaaataaaatcatataaaaatatagaaaatatattaaaaatttatttacaattttaaaaaaattattaaaaaaatagaagtcataaatgaatttacgacttctataaaaaaacactaatgattttaaattcataaaaaaaatttactgaagtcgtaaaatattttatgacttaagttaaaaaaaaaacagaaatcgtaatatcgattacgacttttacttcagaagtagtaacatatgttacgacttacccccttaacatatgttactacttatccccttttggataataattcaaaacaaacctctaaatggtaattaaccaaaaaaatgatcacaaatggttgtttcgccgccatctgtaacgccccattcaatcatcaggatcattaccaaacattaatcaatacacacacatataatcatcagagtttaagcagtttggaagcataaactaagagtgacatcatcaaaggtcactatcataaacactgtacattataatatgatgaatatacatagaatctgcgtttaagtacaaaactgtacaactatctcccctcaggatacaacaaaactaaaccaaaggcaaaatacaaaacatcagaaccgtatgctcaagtcatctatgcctaaggtttcagaatatagctatccctgcacagacttcttgccttgggatctatctgctcctcctgaggattcacctgcaagaatataagtcccacaaacagggtgagatataaaatcccagtaaactcagggcccttgaaggtatttccttcccttggttcacttccaaacatacacatgaaatagtatatccaaaccaactactcttaacatttcatcatcagaatatcattctcacaattatcaagcaatcagaaatcgcaattcacatccacctgtcaatactcaggtgtcccaaacacggcctacaaccgttcatcgcatgaatcaccatcctgtagaggctacatctaagtatataggaacatctccattcaggaggctacatctatatactaggaacatctcatgccaggatctcaatcatctgtatgaggctacatctgtatatataggaacatctcccctctaggaggctacatctatataacaggaacatctcatactagcatctccactatctatatgaggctacatctgtatatataggaacatctccactttaggaggctacatccttataacaggaacatctcatattctatctcaacacaattgcctgaggaggctacatctatgaatataggaacatctccattcgggaggctacgtctatatcacaggaacatctcacaacaggtcttactcaatctccagtcatctatcctactaccataggattatatctattcattcccaggattcacagtcagtctaatagacaatcacgcctatcacaggctaaatagctcataatcatacaattcaatctcacatcacagggttcacattcatttccaatagttcattaaacatatcataagccagacaactcataaccatgagcataaatctcacatcacagggttcaaatcacattttcagcatttcaagtcaacatgcatcaaatcccatcacagggtacagcatacaatccagtagtcaatcacattcacattcgtgttccacatacataccattattcacatcaaaaccattcctccatttggagcatggtggaacacagcaaggacatacaaacaaggaccaagagcttacttgctctaagcaaaacatcggcttccccggtatcgtggccaccaccaccagagatatcaagctcacgtcctacataaaccaacacatagcatatcaataacggtcctaagccgttagaacgaaaggaactaccatcctttctacagaatccatagctaatcacttcacaagtgattctcagatcctcactaggacccctctcagcctaaccaaggctccagagcctctcctaaggcccttttcaggctaacacaagcatatccacaccttagccttatcatattcaagctcataacacaacccatatcagctcataaacaacatctataccatcccaagagcaactttatcatctactctagggttcacaataaccctacattcagccctttctctatgcatgtgtagctcagagccaaaatcaaacttcatcaataatgatttttgaaggctctaccatcatcacaacaaccccctgaacataaatctctacaggaccctgggctaattctaaccccatcacatatgggtcactgttcatgcaaacccccaaactcaaaatcaaacggagaaacttgagtttcttacctcaatggcgacaaagaagacccaaggaccacctccccgagctctgatgtcctttctacgcaatgggtctcaaccactctcaagttctctgagcttttctttggggattccaaaactcactcaaaaggggtttttgaagagaaaggatgagtgattcaaggttccatagtgtttctctcacaagaataggccataagaaggtgttttggtcaagatatatggctctaggaagcttgggggtgccaacaatggagtctagggcagagggaggaagaagaagcctttcttttcctctttttcgcgtccaacacgaactgatataaggctggtctaaagatctcgcgcggatcgcgccgtgccccgcgctgatcgcgcgaactggacgaaagcatagccctgattcaacctcccgcgtggaccgcgccataccccacgtggatcgcgtcatatattcgaacatcccacgtagttagcgtcatacccacgcaagtcgtgccatatgttcgaatccacaaccctgatctgagctcccgcgcggattgcgccacaaccgcgctgatcgcgccatctgctcgaatctcccacgctggtcgctccatctccacgcggatagcgctactactcgaaagcattctctgattctcacatcccacgcgaatcgcgcggaaaggtcaacactacctcttacttttcttaagctttcctctaaccaaagctaatcaccaggcttacatctatgcttagaactcagggtattacaccatccactagtaacaccatcacacaacacttttaaataaatttaaataggataatttttttaaaaatgagattattttgtaactaaaaattggagacgaaactaaaattaaatcaaaaattaaaaattggttatttttaataatttggaaactcaactaaaaatcacctcaaattagaccttatttaacattttattagtttcaaaagaataatataacaccagtttaaaagattaaagtaactttatttagcaaaaaaaaagtgactttacttttttttaattctcttttctttgtaattctctaggataatttattataacaatttgtattacatataatttcttattttttttcattgagtctccttataatctttgtttggagaataagaaatttagtttagttgatcgaataatatgaatgaattattgtaagatctttaaaatttgagtttcatttttaccggttttttttaagtcactttcatatttagcaatcaagtagacaaatactaatccattgtttgtttctgattacaaaatactgaaagaaaataaactttcttgtgattaaaaaatattttatatcataatccaattataaataaccgtttaaattgctttataagaattgttttaaaaatcaataaattaattatatataataaattatgattgaataaaaaggatgtattaatggctatccactttttcgtttctaacaccagatctttcttgagattgtttctttaaaggagttaaagagtttggtttagcaatatcatgttgacatttggaaccatttttgcttttacaagtcatttttcatataacttcagtcctaatataaaattcgaaactctacatagataagtcgtgtactaagcatcacagaaaataaaataaatttgagaagaaaacaaataccaaacctgcttaacggtaaagactaccaagccattcatctatgaactatgacagataattattcactaaggctttgtttggagttaggaggggaagagaaggaaagagatttaaggagaaggaaggggaaggaaagggagaaaaatgagggaagttcattcctccttgtttgggagttaaaaatatattaagagaaagaaataaagagttaataagatgtttttacaattttgtccttgaattgtgattcagtgctttgtattttggtatttgattaacattgtctgggataggatagtaattttactaacactggatggaataggatagtaattttattacttttccttctaaaaacccccaaataggaggaataacaatttttagtctttggaggatttcagaggagttttaaaaatcctcaaatcctttccctcaaaaattaaaactcccaaacaaggagatgtctctacctaaacctttcccttcctttccttcccctctaaaatccttctcccaaacaaagcctaagggaaaatagttcatgcaacgacaatcttaaagttcataatctcactctcactcatggtttaatcacgctactttcactacaaatacaaccaagtgaaatttcttgctacacgtttttaaacaaacccctctccaaaacccaatcttctatcattgcttgagaactaataacctgagcagcaggcaaaatatgcccatcacccaaaacaacaacattggttagagacttccagttttgaacatacactgcaagttctccattaaccttccatatcttcctttcagcattcacaaactccacaatcccttcccatttcattgtcttcacccaaacctctgattggaccacaccagccctcaaatcattctgaccttgatataacaacactttgctcctcctcaccaagtattccaccatatattttacacttttcatcacatcagcatgtaatgcagcctccacaacagcactgcataactcatacacaaacaattcattcacccccaaggccttcttcacctttgcaatgtttaagaatttctcaaccaaataatcctgataacgacctttctttgtatagtcatacaaagtagccaaccctgtcatgtttcgcaacatattcatgacattgtttctggcatctgttgcttcactccaattccccatctgggctaacctaactgcttccaattgagctttctccagctcattcttttgcttctcattgatcaatccaacataataagcattcaaagcatgagtaaccacttgagtttcggggtcagttaaaccatccccaatagccacaccagccaaattcactgtttgagaaacatgcaactgtgcatttttcttcagtatgtgataccctattgtaggaacatactttccaccatagcttttaccaataatataaatagggcgatgcttgaaaagagggtcaagttgaacaaacctggttatagcagaaaaaagatgctttccaacgtggttttgatcagttggaatttcttgtctagttgaggccacactaaagccagttccaatgggactatcaaggaaaagaaggctaaaaattctattccaagcaccatggttgcgttgaagggtgagtgattcagtgacacgccacggtccaagttcgtacaagttgccaatcatggaggagcaaccagggccaccttggagccatatgagaagtgggttatgggagagtggtaaagtggagttctgtgcttcatagaaagcatagaaaatggaagaagttgaagtggggctgattggaaggtaaccatgctttgttgggagggcttttttggggaatgaatgagttgattttgaagcggataatgaagaggctgagactaagagaagacatagaaagaagcagaagaagacttggtttttggtcgctgactccataatctcctggtgtgtatatttgagtatgcatgcactatgtgaagatactgatagtagcctagtaggttaatatataagagctaaactatagctactttaataaaaaaaaaaagttgagtttggatgttgacaagaaacaaaacaagtttgtgttggataatttccgtttttatctgatagatatcttctgttttttatctgatagatatcttatgttttttatttgataagatattttctgttttatttgattggccaaatcaaataatatcttgatgccaatcaaataatatcttgatggcataggcccaacccaattcatactataaatagatgagtaggggtacacagaagacacacagaaatttgagagcctcaagtgacagtcttgagtgacatatttgagcgagcctgcgtgctctgcatttgagagattcttaaagagtttgagtgaaacactctaggtttcgtttgagtgaccaccattgttggagaggttgagtgtaccaccacattggtgtgtttttgattcattgtaacccatatttgttatagtgaattttgatactggactaggtccctgagtttttcttttctcacattgaggaaggttttctcacgtaaaacacattgattgtctctctcgctcccttttgattttatttccacttcagcaatttgatatttgagggtccgcaatacccaacagtggtatcagagcccaggttcgagggttctaaaggagacgagatgaagactagcggcataactcacgacggagatattttcaagttgaccgcagataacttcaactattggaggtcgatgatggaggatcatcttatctgcaaagatttatacgatcctattatccttgaagtgaagccgactggaaagtcaaacaaggattgggagaccctgagtcagaatgccatggccacgatcaggaaatacattgacaaaagcctctttgagcacgtgtccgagttcacgaatgcgtacgagttgtggaacaagctagagtccatgattcagaagaagactcccaggaacaaagcacacttggtccgccgacttgtgaagctagactacaaggatggcatgagtatgattgagcacctcaacacctacaaaggtattgtgaatcaactgtccaaagccaacatgaagattgatgacgagatgcaggctttgttgttgctgagtttgttaccggaaagttgggatactttggtggtaactttgagcaactcgattccagaaggaaaactgacgatggatgccatgatagacagcctcttgaatgaagaagacaagagaagagaacgaggtatatctagcacgtttgaggctaacgttgttgagaacagaggaaagaccgactcccggggtcgtggcaagagccaggatcaaggtggacgagttaggtctagaggccagtcaaggccaaagcatgacttgaagtgtttctactgtgggaaggtaggacacaagataccagactgtaggactctgcagaaagatgaacagaacggctgtgtgaagccaaatcagattgttcctagaagaagaagtgatcagagcaccacagctgtggctgctaatccaaaagccgagatattcctcctcagtgaggaaatgttgaacatagcccatgataactgcacctagattgttgactccggtgcctcgttccacgtcaccccacatgagggattcttctctgcttacaggaagggagattatggtgtcgtgaagatgggaaatcaggtgaccagcaggattgttggtattggtgatgtaaccttgaccacagacacaggatgccgggttaagctgaaggatgtgagacatgtacctaacatgcgtttgaatttgatctcggttggaaaactagatgatgccgggtcagtaaattattttggagatagtagatggaagctgaccaaggaaagcttagtcgtggcccgaggaaagaaagaaggctccttgtatgtcatgcaaggaaagaccaatggcggagaagccaatgctgtccgggatggaccgaacttggagctgtggcacaagcgcctcggccacatgagtgagaaaggactccatattttggaaaagaaagaacttttgaccgagttgaagggtcaagtgctggagagttgctcgcactacctagctggaaagcagcactgagtttcgtttgtgagaccggatcaacccaggagacggaggtgcatacttgacctcgtccatactgacgtttgctccatgtcggagagatcgcttggaggagctcagtactttgtttctttcattgacgaccactcccgcaaagtgtgggtttatcttttgaagaccaaggaccaggttctccaataattcaaggaattccacgccatggtggaaagggagactggcaagaagtcgaagatggtcagatctgataacgatggtgagtatcgtggtccctttgaagcttactgtagagaagtcgagatccgacttgagaagacgcctcccaagactcctcagttgaacgggcttgctgagaggatgaaccggactattgaagagaaggtccggagtatgctatccaacgccaggttgtcgaaagcatattggggagaggcagtgagaacaacggtggatttgataaatctctcaccatcgaggccactagaaggagagattccaaaggaagtctggacaggtcggaaagcgacctatgatcacctgggggtgtttggatgccgagccttcgtgcatgtccctaaggatgaaagggcaaaactggatgcgaagacgaaggagtgcatatacctcggttcgcctaaaaccaagtttggtttcagactttgggatccaatcaacaagaagattgtgagaagccgaaatgtagtcttccatgaggatgagaccattcatgatatctcaaagccccaagtccgggttagtgtccgaagtgaagaacccgtccttcgtgaaagtgttgaagcagagggagaaaccaatgaagaaatcgttgaaggcgatgttgaagatgatgaccagcaagaagctgatgatggcgggatccgagttgagaatgaagaaccgggttctgatgaagttgaggaacaacaaccgagataccccactagagaaaggagaccttctacaaggtatcctgatgatgaatacaccatcattgctgaagatggtgagcctcagagttatgatgaggccgtgatgagctcagagaaaagagaatgggagaaggcaatgtaggaagagatgaaatccctgcatgagaatcagacctatgagttgaccgagctacccaaaggaagacgagctttgaagaacaagtgggtgtacaagatcaaataggaagagaacgggcagaagccaagatacaaagcccggattgtagtgaaaggctgcaatcagaagaaaggagttgattttgaagaaatcttttctcctgttgtgaagattacctcgattcaaactgtgttagctatgacagctacgatggatctcgaggtagaacagatggatgtgaagaccacattcctgcacggtgagttgaaggaggagatatatatggagcaacctgaagggttccgagctccaggatgcgacgacatggtatgccgactgaagaagagtctctatggcttgaagcaagcacctcggcagtggtacaggaagtttgattccttcatgacaaaacataagttcatgaagatggaagctgaccactgtgtatttgtgaagaggtatgagaacggagactttctgatccttctgttatatgttgacatgctgattgtagggcaaagcaaagagaagattgctttgagcttatccttcgctatgaaggacctcggctctgcaaagtagattttcggaatgaagatcatccgagatagaacgaagaagctactgtggctaagtcaagagaagtatgttgagaagatcttgaagagattcagcatggacaaagccaagacagttagcacccctttggccggacacatgaagctgagtaaaagacagtgcccgaggtctgatgaagacaaagacgagatactgaagatcccgtacctatctgcagtcggaagcttgatgtatgcaatggtttgcactagacccgacctgacatatgtagttggtgtggtgagtcgatttctatcgaatcctggcaaggatcacttggaagcagtgaagtggatcttcaggtacctctgaggtacaaccaatctatgccctcaatttggagaaggtgaagccgagctacaaggctactcggatgccgatttggggggagatccggacttgaggaagtcgacaactagatatttgatgagatttgctggaggagtagtctcttggcaatcaaaattgcagaagtgtgttgcactttcaacgaccgaggccgagtacattgccgtgactgaggcaagcaaggagatgctttggatgaagaagttcctaatggaactcggccatgaccaagaaaagtatgagctgatgtgtgacaaccaaagcgcaattcatcttgcgaagaattcgacctatcactcccgtaccaaacatattgatgtgagatatcactggatccgagacatggtggaggctgaacagctcgtagttggaaaggtgcacaccgatttgaactagtccgatatgatgaccaagccggtaccaacatggaaatttgaagattgttgtgaaggagccggactgaagaactcggcatgatgaagccgaggtgagaaggccgggttgttgaagttgaagacctcggtctctttgaaaaacggaagggagagatttgttggatagtttccgtttttatctgatagatatcttatgttttttatctgatagatatcttctgttttttatttgataagatattttctgttttatttgattggccaaatcaaatagtatcttgatgtcaatcaaataatatcttgatggcataggcccaacccaattcatactataaatagatgagtaggggtacacagaagacacacagaaatttgagagcctcgagtgacagtcttgaatgatatatttgagcgagcctgcgtgttctgcatttgagagattcttagagagtttgagtgaaacactctaggtttcgtttgagtgaccaccattgttagagagattgagtgtactaccatattggtgtgtttttgattcattgtaatccatatttgttatagtgaattttgatactggactaggtcccgtgagttttttttttttttttacattgaagaaggttttctcacgtaaaacacattgattgtctctctcgctccttttgattttatttccgcttccacaatttgatatttgagggtctgcgatacccaacagtctgtatgccccgacaacatgtttgtgtatgcaccgaccgcaatgtcactgctaagtgttgatgaatggcattgaagaagctgaagacaagtagtaccttcaggaatggaatagggaggtggaggtcgttgattagatgtttgtgtatgcaccggcagcaattggctaagtcaatcaagttctttaaagtaaataatgataatttatttaaatgtgaaaatattttttatcattagattttgatagaattattttcataaagaatccacacagaattgttttaatcttaaaatgtaaacaagaatattaattgaaggggaaaaaatcacattaaatttcacggaacataaaagacttgatctaaatctataataataataattattattattataaaagaaataatctcatttcgttgccatttttttataaacaagttattcaactacatattcagttaatttccaagttcatacaaggagtgtctatttttgcgcactagtaataaatagcagatctgaaagatgaattttctatcaagacatcttgtgtctccatgttgaccaatggccatgtgagtcgtgcaagaaaagagaaaaattaatttgcccgcggtatattgatacacctgtcaacggcttccttagatatgtaccaaacatgaacaaattaaaagagaaaagcaaccaaaagatggaaatgatcataccatatagattttaaaaaagcatttcggatcttgctgataatgaatgtaatacttaatcaaccaaaacatgtattaaccaaatatatatcatcaactttactattgaaaaaacaggtttcattttgtttctaaacctttcatctaaaattatccttcaacaatccaaacgcattcaggacaggcaactctatccttcctcgtatgttgaaagcatgtaaactattgagtttagtttcactgtatatataaaataaatgaaccgtgttgctttcaacatacacaaacactgaaacacatcatcttgtgcctgtccatcaagccatggatcaaaagtacctaaaaccattggtcaatagcaatcctgtgcagcgttattgtacctcatcaaaaaataaggacagtcaactgaattccaatgatggctgccaaagactcacgtttgtaggtaggttcttctaaaatatgaatatgttttgatataaatttttttataaacacttttagaataaaaaagtaaaaagaaaaaaaataaaatgaaattttttataagttaaaatgagtttttcattagtctatttgtagatattattttatcttttagaaaacaatattaatggacttctaaaaattaattaatgaaaaatttatttttacttttaaaaaaatttatttttttttcttattttcttcttttaaaagtgtttctaaataaacttaccaaacaaatcatatataacataacaaggagcttatggaattcctccgacaataccaagaccatgaattatttaccaaaaaatatagagacataatgttccattatcaataccaagagaaaagacgcaaaaaagagctataagaatctatcaaacgtgcatctaacaagatgtactgaaaataagaagcagctagagtaacttttccagacagacccagatggttatcataagtgcttttgggttatttggcatttttatgcttccataaacctgcaaagtgaaagggaacttcaatctggtttgattaggagaccctgtcctaacattgacatgcttgcaattgaagttgctaatgacttcattctagtgacatggatctctaccttggacttgctaccggcattagccaccaaggctctggtttgcttcaacattaggattgggaaacttctcctgacccatattttgattctgattccaaccttgaccctgctggtgactttgcttctcttgactctgatcttcgatgctttccccactttgtaccttcaactttttccgctccaaacccttgctatcattcgtccctgaactcggagagtccaccaaaccttgagcttggtcttgtaaatgctcctcctcacattggtttgtattttcctttggcttaggaggcctccctctgcctctacctggaactcgaacacgctgctgcttagcttgaacttcttgtggtaactgtgcctcacatatgtttgtatcttgaatcagtttacggggcctcccccgacctctaccctgacgacgtttctgagcttgatcttcttgttgtaactgatcctcatattggattggatcttgttttagtttaggaggccttccccgacctctacccctacccctacccctacctcgaccatgatctccttgtcgtaactgctcattttgatttagtttaggaggtctgccctgacctctaccttgaccaaacttcacccgacctctaactcgaccaagcttcaccccacctcgacctctacctctacctctacctctgcccgactgatgctgcttctccattttgtttatgtttgggctttgttcaacatgaatgtcatcatatgaaggtaataacgactttcctgggtagtttgcttcagtctctaacttaggaggccttcctctgggacgttttggaggcttctgctcagaacccctggacaaaaggtcctcatctaggtcccctttaggacttcctcgattgtaatgctggggctggtcatcatgagcattctccaaagttgatgaagcttttcttttggaccctttacccatatcatctgaagaaacttgttgcaactgtgttggaggtaattctatacctatagatactatgcactctgaagagccttctgaagtaggaaccaccaattgcttcccaatatcatgtgttggattaacaggagaattaggtgctgctggctgggatgaagaacttgtttctttttggtttgaatgagaagagcacaccatatcttcagcttgatcaagtggatgtatcttcttattgatgcggtgtgcatttctacgtagcttaagaccccttcctcttcctctagttttaccttgtgacagacaccttccatcaattttcttttcctttggctcttgctcaataacagtaccttcacctgagggcaacaataaatccccttgatggtctgcaatttgcttacacttacgaggcttcttccctctccattgataatcagaatgcctggtcaacgggttctcatcttgcttacattcttcaacattcaaagataatgagcctgacattttggccgctgcatccgcaccactttctgtaggtccattacatggcatttgcttttgcaacggtgcaagcaataaggggtttgcagcagctgctggtatacacttcaatgctgttagctgggaggaacaagttgtttccatatgcagcctggaattctgttttaacaacaccccttagagattacattacatatatatccacagtcaaatagaagggagaaggggtttgcatttacatttacccattgctaggaataattcaataaactagtgggatcaatgactcccttgaggtaaaagagaaggaaaacaaaagtaatacatgggatttgtactttgtagtggtgaaaggaatcatagcacgaaacatgtttctgataaaaataataataatttgaggttatattatgacattcagcaagcaagcttaaacataatttgctagattgagtaaaacagattaaaaaaacctgaaaaatatggagacctttggcacatgggatggaattgtggctatgtcacaatatccttaacatgaccttttccagttcccccaattaaagtacaacaagacaacaaaaagccaaaaaacaactaagagaaaatcattatttaaaagagagactccataatcgatgctataaacacacaaaatggatccagcccttcctagaaaaaaaacaatcattcccattttactacataaataaagagggaaaaatcactatcaatctcctgctaacaaaaactaataacaaatcaaattccacattaaaaattccagatattatcaaaacatcacagcacctacatgattttgcgactctcctaatgcccactgcgcttctgctttcgcgtgttgttggctttgtttttcaaacacttgaagccttccctcttcagattcttcttcaacactctttccctgaccaccacgtttacttctctttctccccctcttattcttcttaccgctaatcttactacgttgtttctctctctcttcatcctcaacattcaccacatacctcccaccagaaacacgctcaatctccccaatctcacaaagcttctccaactgcagactcagaatcctcccatgagcccacggcaagtcatcgtactccctcttgatgaactccgatatcgccttctccgtcgacccggtcctctcctccaaccctattatcgcattgcttatcatctataaaaaaaaaaaaagaacaacgtcaatgcaattgcacctcattatcaatttcaattgccatactgacatctcgttagtcaagtcacgatgatatttcccaccaaggttttaaaaaatggtacgcgaccgtgatttagactgcaacatcgagaaataaagcttttaactgtttacgatttgtcacgatatcaacaaacaaacgcgatgaaacataacgccgtggatatttaaaaccttgctttccaccaataataaaatgataaacaaaatcaagtccacgaaaaataaataaaaaataaataaataccaatgcataaggtgggtgtgtaggggtgtgaagcgcagggaaaagcttttgaaggcgttgctgaacgagggaagagtgatgaggttcgacggagaaggaagggttgagttttttgagtttagaaatcacagagtcttggaggtgagtcatgacgcgcgcggttctggaatcttcgccgtcgtcgtcgtttggattttgccgcgtcgtcgccgtcgtcatgatggatggttgtgtatgtacgacgcgtcgtacgtttgaaaaagctgaatacgattgcgttgcgttcttgcgtttttttgcttcacagttgacagcacttgttgatgtaatgtgttatttacttattttattggagctgaaaagaaagaagtgacgtctactacgagcgaggaagctccaaaatgatgtggtgcagccgcgagggtggaccactagcacatgacggcgcattggtattcgtaggtttacctattttttatgccattgttttggattcgacggacgttataaatatttgtttatcttaatagagtatatccatattgtattttaaaaatttcaaaataagtgtataattaattttttaatataatattattgtaaatgctgtatattgtagcttattttattgatattaggatgacctcaaaataataagggtcaagatcggccagtgagaggataagtttcatcatcaaaagggaaatagtggatcacatgtttatatagaattataacataaaataagataagaaacatatcttataatgtagtagatatatcttatataataataactattcaaaataaactaagatgtattttatcatatactagatatatcttatctactactcttcctcttagacataagaaattcaaattggttagaatcgagagctttgtcataatatcagcatgcttggaggaaatttgtccgaatttgttgtatgaagataatcttatttagaacatgctcacgaacaaaatgacaatctaattcaacgtgctttgtaagctcatgaaaaattggattagaagcaatatggatagttgtcgcaaaagagctgcatagttactttgtgggagagaccaagagagctaaagagcgatgcacgttgatcaaagccaacaaatgtaaacttaaccataacacaatacttaacatcttaaagaagcaaactcgttaaaccaccataagacagaacgcaaaaaaaggtttaaccacctaaaaggtagaagcaaagtgaaaatgatttaaccacctaaatggcaaaagaaaatttacttaaccacctaaaaaaggcagaagaaaaatggcttaactacctaaaaaggaaaaagcaaaaaaatgatttaaccacttgaaaggtagaagaaaaatagcttaaccacctaaaaaggcataagcaaaaaaatgacttaatagagagtctcatcaaaagtattatcgtcaaaagtcacaactgacccattgatgaaactaattttcataaataggacgaagatccgtaaggaagcagagttcttcggtgatgaaactaattttcataaatacgacgaaaatttgtaaggaagtacgacgaatatctgtaaggaagtggaggtctccgatgatgaaactaattttcataaatacgacgaagattcataagaaagcggaggtatctgataatgaaactaattttcataaatacgacggagatccgtaaggaaacgagggtctccagtcatgtgttgggaagcgccgctgtcaataagccgagagggggacaatgacttattggacaaaggttcagacatgggcttgcattggtcagcaagagtcaggaggagctggtgcagtggcatgagcaactattgtggaatgcagacgttcatttattttgaaggcacgtgaagaagacacggcaaaggaaaaaaattggcctaggaatatgaagaagaaagaagctcttgtggcaacagaagataattttgtttatgaaggatgtcatgactctgataccatattgatgaaaatgctgtaaattgcagcttactttattgatattagggtgactatttatatagagtcaagtacaacaaaaaataagatgtatatcttatcatgtactagatatatcttatctaataacaaccattcaaaatcagctaagatgtatatcttatcaggtactagatatatcttatctaataacaactatttaaaataagctaagatgtatattttatcatatactagatatatctaatctaataaatactaattatttttttattaacatttctaataaatgatttttttagtttttatatctaatattagaattatttacttacatctaattaattttgtaaaattatcattgtttatatttttcatctatttatcatttttcttaatttattttgagatagaaagagtagtaattttatctttggatatcttccatgtgtcatttcagtcctctttcaggtagtattaccattacaactatataattttggtcccttttatcaaattttattaaatatttaaactttttttattttaagaatatatactgctaagtactttataaatcaattcttttaaataataataaaagtaatataatatttttattatatacataagtattaacttttatttaattttaataaatatacaatatttaataaaatatcatacttaatatattataagtataattaatttcctaataacaatgaatataatattcagtcaaaaggatgaaaaaatgagataaataattatatatttatgtattatattgttatttatttaatttttctaaagtatgttttatcaaaaaaacaatttcaaacataaaaaatagtgaaaattttaaaatattgaaacatatattacaattcaagaactttaatgaatatattgtattcaatgtaatataggaaaaattgactatccaatcatattagatattatatgttgaatataataccatcaaattattaagaatataaaaaataaattaaaatccttattaattaacatatatgttaaattttttaaaatttaataaataaagagttaagaagcatgcattgtcatagtaaaacaatttatattgttaagcatccaaaaactattttgcatggttcttaaaattattattataaaagttaatcaacaaatttatcatatataatgtttggtaatatataattaaataataatgtcaaatgactttagtctatcagtaaattattatttatttataaatatattttatctaatagataggataattaatatattataagtatatataattgaataccaaaaacatttaatgttcttatcagattctggagtgctatctcgttcgatctccattaacaatcggattttctgtgctgatatgccgagctctccgggcagtggggctggtacttgcatttatcgatctgacagttcaaatcaatatgtaaatgatcaaaataatgtgtaatagaaagataaattatctgtaatgtatctatgtatttataataatagagtttgtcaattattaaaatagaaagttacctagttatgagttacttggatgcacacttattttccactatatcttgactaatacagaagtccctaagccacaagcagagtttggagcaaatatccattaatgtggggctaataatttggattttttgtcccttggagtatataatcatgattaaatgattttagttatcatagatgtatgtcattaacagatgtgactctaaatgtcaaggtggacaacaacatgtaagattgtggctaggactttccaacatacatctctcttcaaattgaaagctttaaataacatcaaagactagattcttgccacttcataagtgctaaagattgaaagttgttaataaaaatgagtaaaaggatgatatgatagcatcatgacttcacaatgatcatgtatttttaccatttagggatgttgtttagtatctataagatgctgacagtgtactcctcattataatgatcacgagatgttacccaacatttataacttgttatggcaataaacaatgtaccatgtctttgtgttgccaagttttacttcctttcttttttctctctctgaaaaggcttccccactttccagttcacacaacaaatatcatcacaacataagaaatatattgattaacttattagtttagaggtgcatgccgacaatattgtgggttgttcttgctaaagagaatacaacaatggtatggtaaaatgataattggagattaacataagaaaacattcaaatctacatatatattaacctatttaaattattgatgtcatattcacaataatctacaatcaagaataaaagattaaaattataaagaatttgtttttcattatcataatttatatcataataataagtctctaattttaatcaaggatttgtcaaattaacaatttaataaatcaataattataataataaaataaagagcaattctttactaaaattgataacacaatagtttagattttggacatacacatttattcccaacatgtggaaagattcaatcttttctaatctctgcctctcttgaagagtccactcctttgtagctcttgttgagacgttgattatgtgattttcaatttcaatttttatttcattgtctttcaatttttacttcaattattgtttgttttgttcaatttagctattgattttctagtttgtacttttgttgtcaattgtttgagatttatgtttcctttaaaatctagtcatgacaaaaaaaatttttgagtgatggtgcttcaattatacaatcttacttttaccaatttttttccaactttgattacatcatttattaacaatgcttttagaacctgaaaagactagtcaattcgactagtcataccgagaaccagtctgataacacaaaaaaactaaccctttttagaacctttaataactcgtcaaaggtatctaaaaagttccatgtcacttaggagttaaggacaagagtaacttataagcattggtcccttccctcaatccacttagacaccttggatgctgtgaaccttaagcttgccactcgacttgatgttgaaacattggcaataaaaggtgggcctaggacattcttgtcccgtatcctcaattaggggacttgtttcaatttgttaaaaatctcattgtttagaagtcgagaccaatgataatttatatataaacatcatcctccctcaatccacctaaatgtcttttaataaggacaaaatcattatgggtcaccaaacactaaatcaggtaataccttggatgtgatgaacctatgctagcgaactaaaggttagaacacaaattattattaaatttttatcttataaaacataatttagtcatatatactagtttataattttttatatctttatttgttataataatttcatataatactaattttttattttctttctaatgtagatgtaaactttttattattaatggacattgttgtaacataaatctaggacaaagtaacttaacctaaatttaaatgtgtttggaaattcattcagtcactttgaaccttatccctgaaaaaaatattgttttggcttatatgatcaagctcttcatgatactaatagcttaaggttccaccgtaaattggcaccttcagctgcttgtaatgtgtgctctcacctttcggaggacattctctattgccttctcacgactgcaaccacgcaaaggaggtttcgttgctcaaccttcatcttttttcattctggattcttctctcattggatcaagaaccaaattacatcctcataaagatttccatttgctacaacaatttggtggttacggtgttggggaaacaaccaattttttatgatgaaatcctttgggaaacggataatgcttagttgcaataatcaattcaagaacctgcccttgttcaatctacttgtgacttggtgttgcaagggacggatgtaggttaatggtgaatttttacaaatttgaaattttaatgtaatatatattttaaaatacataataataataataataataataataataataataataataataataataataattaaatgtcatttaattttctttttttagataaaatactttagtatccttccatcgctattattgaaaagataatacttgaaaataggaatatgtagaatatgaattgtgtatcacagtaatacaagaggtctctatttaaagagatcaactaaagataaagataattaaagataataactaaaaataataactatcaactaaagataacaattaaagataactaaagataatagttaagataaaatctaaaatatatctatttaaaatatatctatttaaaatatatctatttacaacacttcccctcaagctgaggaatagatattaatcattctcagcttgccagtaagctcttgaaatctttcagaggaaagtcccttggtcagaatatctgccttttgaagtccagaaggaatatatggagtcgtgatcaaaccgctatctagcttctctttgatgaagtgtcgatcgacctcaatgtgcttggtccggtcatgttgaacaggattatgagctatacaaatgacatatttattatcacaataatttcatagatccttcatatcttattttaagatcatcaagtataatcttcaaccaaagtaattcacaaacaccctgagccatagctcgaaattcagcctctgcacttgatctggcaactacatcttgcttcttactcctccatgtcactagattaccacaaagaaacatacaataaccagtggtagatcgacgatcagttacagagccagcataatctgcatcagtatagacttcaagggagagattaccatcacgtctgaataacagtcctttaccaggagtggctttaagatactgaagaattctcccaactgcttgcatgtgtttttctttcggattatgcatgaattgactcacaatactaacagcataggctaagtccggtctagtatgagccaaataaattagcctcccaactaacctttgatattgtcctttatcaaccggagaactctcctcctcataacctaacttgtgattctgctcgatgggagtactagagggtttacacccaagtttccctgcttctttgagaagacccagaacatatttcctctgactaacaaaaattccttcctttgaatgagctacctcaatccctaggaaatatttcagtcttccaagatcttttatttcaaattcagaggccagtcgtgcttgtagaaggttcttttcaacaatatcatcacctgaaataataatatcatcaatatacacaaggagtacagttaacttcccatcttgggaatgtttgaagaacagtgtatgatctccttgactctgtctgtatcctaaggctatcataaccttagtaaatcttccaaactaggcacggggagactgtttcaatccatacaaagccttttttaacctgcaaactttattccttccatccattgagccaaaaccaggtggaatttccatatagacttcttcttctaactcaccattaagaaaagcattcttcacatcaaactgattgatatcccagttataatgggcggcaagagataagagggctctcacagtattcatttttgcaacaggagcaaaagtctcatcatagtcaataccataggtttgagtgtagcctttggcaactaaccgagccttatatctttaaagagtaccatcagaattgtatttcaaagtataaacccatctgcatcctactgctttctttccatttggtctatcaacaactgcccgtgtgttatttttctccaaggcattcatctcttcttgcatggcttgagtccacttctcatcttttaatgcttcatctactgattttggaattgagattgaatctagtgctgaaataaagcctttgtgctgcatagaaagtttagctgaagagacaaactgcgagataggatatttagtacaagctggacaagaagaacaagaatttttggtacaagacctcttcccttttcttagggtaatgggcaagttatcagaaacactaggtaagtcatcagaagcaacatgcaagtctttggacaactcatcagatacactaatattaggttcagaaataggagattcaggacttaccgtttgttcagatgattgaggttgctgaggaggcaatgggggctgctcactcctgtgatatactaactcaggtatatcaattcttcgtatttccagaccattagtcgatggggcagacatagaaggattcgaaacaatgggaaaaaatacagaagtagacatgaaaggttcagactcaaagaaagaagatgactcagaacttaccgaactgttcttcccctgaagataaggactagggaaaaaagactcagattcatgaaatgtgacatccatagattcaaaggatttccgactagcaggatgataacacttgtagcctttcttatcaggagcatatccaagaaaaatacatttgagagctttaggatccaacttactgcgatgatgtttgtgaatatggacaaaggcaacacatccaaatactcgaggttgaagactttgtaaggaggacactgatggaaagaaggaagtcatagagtgaataggacttatattgtcaaggacccgggagggtaatcgattgattaagaaagctgcagtaaggatggcatctccccaaaaatgatttggtacatttgtttgaaaaaggagagcacgagcaacttcaagaagatgacgattctttctctcagcaactccattttgctgaggagtgtcaacacacgtgagttcatgaatcataccctgatcttggagaaactgagaaagacgctgattgacatattcagtgccattgtcagaccttatccttttaattcttttcccaaattgagtttcaatcattttataaaatttgaagaataattgaggtacctcagatttttcatgcattaagtaaatccaagtgactcgagtgcaatcatcaataaaagaaacaaaccatttattaccagaaccatgagtaactttagaaggaccccaaacatcataatgaataagatcaaagggttcaatactcttaatagtagtagaaggaaaagatgcacgatggtgttttgcaaattcacaaatatcacaacgaaaagactcaacagacttggataaaaataatgacggaaataaagacttacgtagactaaatggaggatgccccaagcgcttgtgatgtaaccaaatcaatgagtccgtagtacactgaccatgagttagtaatatgtgatcctcagtacctttgtcaaaagactttggaaccaaatagtacagcccaccttgctccttagctttcccaatcatcctccctgtggtgagatcctgaaagacacagtgagtaggaaagaaggttacagtgcagtttaaatcttttgtaatttttttgatagaaaggagattggtggagagtttaggaacatgaagaacatctttgaggtgaaagaaaggttgtaaatgaatgttaccagatcccacaactgatgtatgtgaaccatcagctacggctattgtatgagtaccaatagtagggttataagaaagaaaagattcagcacaacaagccatatgatcagtagcaccagaatcaattacccaagaatgtttaaaatcagtacaagaagtaagaaaagaataattagtggaactcataccagtcatggtcaaagcactagaactagattgcttactcagcgaatcaatgatggtccgcagccgttctaactcatctcgactaatagaaggaaattctgaagatccagattggacctcatttggtgcagtggttatattaggagaaactaaatgagcttgaccacgcatccttgccatcttctcatagactttctgctttccatggaggcggaaacatagatccttgagatgacctagccttttacaataagaacaccaacgatcatctttcttaaattttgaagatgcaccatcaacaattttgttgaaagaatttccttgagaaggaccatcccttcttgttgagaccatagcagacccttccatggttttagaaatagcaacatcagatgatgacagcatggcagacttatcagatgtgactgtgcatcataactcctcgtcgagtctcttcacctcgaacagtattgaaaacaacagaaagggatggtaaagaatctttgccaagtatctgaacccgaataggatcatattcggaattcaaccctgcaagaaaatcaaaaatatgctcatcttccactgccttggtcaaggcaatagcatctgtagtacattgcatcttcaaactctaaaattgatcaagttcagtccacaattctttcaaaacaccatagtaagcagtcacagataaagagtcttgtttagtagaaaaaattttattgcgtaattcataacgcgcagccatatcctgttttaaagagtaggttgaacagacagtttcccaaatctccttagcagaagataaaaacatacagtgacgacccacttcaggagtcatcgaattccataagggaatcttcattatcccaaataagaaaattaggatcagtggcagcaggagcagggccatccagatgatcaattttacctcgactcttgatggtagtgcgaataagttgagaccatgacaaataatttgacccattaagtcgataattctcatgtagagaaggaagatcattgtgaccaagtgggttcaccacaaactgtgtagaggaaccatgaactcgtagaggagactcagttcctgaaccattgtcggaactagccatactatagaaaatagatcaagaacaaggattttgcacttaaggtaataggcgcggaagcatagctctcagaatcgagagctctgataccaacttgaaaataggaatatgtagaatatgaattgtgtatcacagtaatacaagaagtctctatttaaagagatcaactaaagataaagataattaaagataataactaaagataatagctaaagataataactatcaactaaagataacaattaaagataactaaagataatagttaagataaaatctaaaatatatctatttaaaatatatctatttacaacaataatgttattcttttacctttttagataatatattctattttcatttatagttttatagagataattatattattttatcttgttagatatcttgttatggattttatagatgagcttagtgataaaacccattgaaaatttgaataatggactgttgaccacaactgcaaatgagatcatggatttcaaagataataatagcaaagatagtaggatcaagcggttaaagacttcagtcatgattatcggagagaatcttcaactgaccaaaggtcatgtcagtctaaataaggaatacattcagaagaaaagttatacacccactcgttctctattctctttccattaacactatgcacacacctcaccccacttgttgaatattgctttgtgcataatgatcatattttttagggtatttctcttctacaaatacctcgagagcttgatccaatataaaaaattcaaaatcaccaacatccttactggagatttctgtttgtgaaaggcagaacatatatcatatttaaatatcatttttaatagtattttccttccataatttgttattttaaatattataaatgattatgtttacgagacgaatatcaagttgcaatgtatattagttaattttttttaatgcataactatttattgtcgcaacacaatatttttcttctagtttccaacaatttcaatcttcctaaaaatttaaaattgacataagtacaaatttttattatacattgataagaattctgtttgacatgtgaaactagtgatctatatttgtaatattgaaactttaaacatagacatttagttactcttacaaaattaaatcaatatatctttaaaattttaataaattgttattataacaaatattttatatatattgacaaaatttccccccttttcccccttcccttgaatgtttggctggcgatcactctcctattttgtttccagcttccatttatatatataaaaaaatgataaatagtcattttcattcctaaatgtatagaacgctaacaaattcattccttaaagatgaaaatttaaattttagtccgtaaaagtgtataaagtgtgacaaattcatccttatgttaacttttgtccgttaccgttaatgaaagagtctatatgacacagagggagaaaaatgtcacaaaaatgattgtcaacatgactgctaaatagattttgggattttggacgaaattgctaaatagattttggatgaaaatgtcagtaagttaccattggatgaaaatgtcaataattttctattggacaaaaatgtcagtaagctaccattagacgaaaatgtcagtaattttctatttgacaaaaatgtcaataagttactattggatcaaaatgtcaataatttttcactagaccaaaatatcagtaactttttttgggaccaaaatgtcactacatttctattggaccaaaatgacattaagtaaccatttgaccaaaatgtcagtaattttccattggatcaaaatgtcagtaattttttattagaccaaaatgtttttacgtttctattggactaatttgtcatatcccaaatttcatttcatttaagggtaaatcttccttcatttttttatcgttacaagcataataataacattacaataatcacttaaaaatagaaaaacatactgataattgctatgcatatgtaaattttacatctaaatcacataacaattatctttttttccctcttttaacgcttcttctataagtaaaacgtaggaatttagcttcttataagtttttatctagtagatgcttaaattaattgatttatagtgttggttgtattttttttttgtagaaattgatacaacaaagacatagaagatgaattgaagatttggaatggctcgctcaggacgcacatgtaggcttagcgcgcaaatgcagacttagcgcgtgaccaattccaaaaaacatgacagtgcacgttttgaagaataaaaaaagggggagacactgtgcacttagagcagacagccaaggagagacataggcaaagctagggcaagaaaaagagagaaaaacccactcacttgggaccccttcctccattttcctccattctcttccattttcttttattcctcttgcttcctttttgtatttgtaagtctctcatgacaatgagaggttaaaccatccattattgggtgctcaacaaccaaacactcttgatgtaatgattctaactatctatttaatgttatctttgtattattgttgttttttgagtttattttcatgtttgtggtctgatcattcatgttcatgttttgttttgggatttatgcattgggaagtgtttatttccgaagaactgaaaagaacatctaagtgattcatatctaaggatataatggtattgtttagcctaaagttttcgtctctatccttaatgcaaatcgtttagcataactcttaagggattaggagtaaaatttaggctattgcacatgaggaattatggttagagtagattagaagacaaaggtaatgggagaataatgttaaatagcgaaaaatctttaatattgcatcaatgatagtttcggcgagttgagccccaacatgtcacaaaattatgcatcaaccgacaactcacctcaagtgtttgtattctatctctttaatgtgctttacttatttatctttatttatgttgaattctatgtttccacattagtattagacaaatatcaaatttaattcgttgtgcgcttaagattagaaatatacaaactttgagtacagtcaaagtccctatggattcgacactcggacttaccgttttattattacttggacaaattggtacgcttgccaaagtgttaacacaaacataagttaaaagaaacataataataaccataatattgattaataagcataataatatgtcacaatagtgtatgaatgtttattttagatttatccttaaattatattttacctttaaataaaacaaaatttggggtctgacaaattagtcaaatagaaatgtattgacattttgatccaacaaaaaattactgacattattgtccaatagtaacttattgacattttcgtccaatggtaacttaccaacattttcgtccaaaatctattcaacagtcatgttgacaatcatttttgtgacatttttgtccctatgtgtcacctaaactctttcataggtaaaagacaaaagttaactaaataataaatttgtcacactttttacactttcgaggactacaatttgaatttttatttttcaaggacaaatttatcagcactctacacattcagggacgaaaatagttatttacgctaaaaaaaagtcacttagaacacagaacatgatatgagaataatgagatttgggtaatgtgcattaatgagtgaaatagaaatatactatttttttaagaaatatatatatatataataacaataataattttatttgttattattatagttgtaataatatttacattttctttaagtgaattttagacagaaaaaataaaatattttcaaatggttctttttaataatcacaaagaggaagcatatcgaacttgaaaatcaagtctcatattttatatcacatttttatacttttaatatctatttttagataataattaatttgtatttaataaaaagtaaaaaatataaaaaaaaaattattttattttaataatgtttttcgtaaataaatatgttaaaaacaaaaaaatattaatattggttgtcacaataaattaaaaaattattattgtataattaaaataaaattcaattttgatttggctaattaataaaaagctttttgtttcccatttgtcattcaataatcaatatcatttacctttctctgttgtccatcacttcccattgtctgattttgcaaaaggaaaaacgtccaatttctccccattctctctctctattgggtggaaagcttccgtctttaattaagagggttaggtggtggaaatctttgatctttcctagcctctctctaatgtaatttttttttattgaaatgacaatgtcaattagttaacttatgtctggtaccgttaatgaaatctccaattgaaaattaatgacgttttagtccaattgtaacttactgacatttaggtctaatagaaaattattaacattttagtccaatggtaacttactgacattttcgtccaaaatctagtcagcagccatgttgacaatcatttttgtgatattttcgcccctctgtgccacatacctactttcattaacggtaatagacaaaagttaacggaaggatggatttgtagcactttttacactttcggagacaaaaatttgaattttcatctttcaggaacggacttgctaccactctatacattcagggatgaaaatgactatttaccctaaaatattgtatcacaataagttaaaatatcataatataagtaaaataaattttattttgattttgcaaattcttatttctatctcatctttgcaaaaagtcatttaataatactagtaatcaatatcattcatccccaatctctcactcatcttgcaagttgcaaaatgtcattcaataattaatatcattcacctttctctctctctcaaagtcttcatttcctattttccattttgcaaaagacatttaatttcatacctctttctctcaaaccttcatttacccattttctttctcttgttaacaaaccctaatttttctctcactcatcgctgccaaagcttgggtttagcggtggaaaggttcgatctttgaaaggaaaagggtctagcagtggtaagctttggtctcttctaatctctccctctcttgaagatctagtccacactcctttgtagctcttgttcatactcaggttatttgatttagggtttcaatttttatttcattgtatttcaatttttgtttgttttggacaatttagctgttgattttcttgtttttgccttgtttgtattcaggttatttgatttagggtttcaatttttatcattgtatttcaatttttgtttgttttggacaatttagttgttggatttcttgtttttgcctgtattatcaataatttgagatttgggttttcctagaaaatctagtgacgagtatatgttttcggagtgagcgcttcgagtactagcttacttttaccacaaattttgaactttgattacatcaattattagcattatttttaaaatctaacaagaccaattggtttgactggttagatttcggtaacacaaaaaaatcaaccccttttgagaaccagtcaaaagtcccacatcacttaagagttaaagccaatgatagtttataaacacttatccctgaatccactaaggaacttttaatatggagttcatacattttaccagactatgggacagacatgttccaaaatccgttctaactccccaaaaccgagggtctgagacattcttatcccttagagcaactttagtgcaagatcttgagtaaggatctttagcttaacatttggtcttcactagatctcataataaaggaggtagagagatctccaacatggagaatgagttcttgtagaagaacccttaagatctacacattgttcaaaaaagaataatttttccctctttgtctctccctaagatttcaaaatgaggtataccattaaataacaaaatgggagggatcttgagaaatcttcaatcctacgtggcactatggggtctaccgaaaagtggtctaagatcccaatttgagatctaccactaaagatgctcttagccttgactagggagcttgttttaattagtatgtcaaaagactcacatcgcttaggattcgatgttaatagtaatgtacatataaacaccatattccctcaatgactcaacccacttggacatcttttaataaggacaaaaattatgatgggtcactaagcaccaaagcggataataccaatattagtgaactagatgttgaaaattatgatattatattataatcaaagattaaaccttgacccatattatattttaaatgtcaaggtgatctaacttaattggttgaacaagagtgtttgaattgttgtaaacattttgatattatcttgattcgcatgaataaaaaatattatattttaagggatcttctctaaaataattactcatcatcatcatcatcatcatcatcatcatcatcatcaagttgaccactgtcaaactattaaaccatgaactagaagtgcctctatcatttgcccattcttaaaaaacattcattactatactacattgtatatatagcttgacaatgcagctaaattgatttttactttctgcaggaactccaaacaaacatggactcaattacgagaagctgtattaacaagaggttgaaacccaatcctgaaggtcaagactttattagcaacctacctgatttcgttattggtgtcattctctctctgcttcccaccaaagatgcaattcgtaccagtgttttatcgaaaagatggatatatctctggacgttcatcactgcattagaaattaaggatagggaacaactttgtcgcaaaaagataaggaaaacccccttctataactttgtggataagatactacttcgtctaaacagttcaagcatccaaagtttctctctttctctttcacagagttatagacattgtcgtgttgataagtggatttatgatattttaaaactgagagtcaaagagctttacatcgattcaaagcaaaatctcaacattttctatcattcccttttggaatccctctccttagaggttttggtgctgaatatggattggttttctattagtgttcccacctttgtttgtctgtcatctctcactgtcctaaagttctccaaaatcacgtttacctgtcaccctttcaagtcgcaaacgttgacccttaatttcccagtccttagggagtacgtgacagaagattgcagttggccaaatgtaaagggtgtcacgtttgaagtgcctcttcttgaagttctttccatgaagtattcaagttataaaatatgtaaagagtcgcgtactgtaatcaagttttgtgccccgtgtcttgcaaaattctattatcatggtctcgtattactagacaccaacactttagacctatctaaagcacatattgcttttgctcatattgatatttatccatacatctatacggagagtgcagaacaaagggcgcttattgcttgtgagcttttgaaaaagttcaataataatgtgaaatgtctaacgtttcagtggccagaggtacgatgcttaaccctttgtttgcaatgaatattgacaacaatgaaatttaataattaatgacatcaatattcctttcctgggaacatataaacatgttactttgctaatgctatatcagagtctaatatttatatcatacagtataatgtataatgttgtttgttgagttgttgtttattagattagttgttgtttcgttccattttatatacagtatcttgattgcaacaattcaaacatttttttgcccctttttatcaaccagattgttgcaccagcacaagataatcttcctgcttttcgaatgttgactagtttggagttagggtgtcttgtgggtgaagttttgttgaacttccttcggaacacaccatttctgaagactctgattttagaggttagtaattgattgattgagactgaatactcactaaattatacaaaatgtttttgtagattgtcagcatttttgcaaaggaaaattctaattaatgtgttgttcagttcttgtaattcgatttaattgatatagctttgtctttcactgtcatcagggcctatttcagtttgatgaagagctctctaatcctgataacgtgccttcatgttttatatctaatcttcaagtggtgaattttggggttctgcatggtaaacagcatgagctgcgtctcgctaaatacataatgattaatgctaaagacttgcagagggtgagtttcagtgctgctaggaatctgcgcaggtcaaaatttgaaaggcttaaaatgaagataatttcgtttaggaaaagtgttagtgttccggttatagatttttcaccccttcataattagtttactggtgcatttttagcttggggttagactgcaaagacatttaatgtttgtaataaatcatagcttatgttctctccatgtttctatgaagcacattgattaatagttacttttaatttagagtttagaaatattgatatcctatgaacaatagaaaaaatatttttataattaagtgagctgcactatattttactgtgttcttttaatattttaattcataataatgtttatgttttttaatgtgttctttagtatcatatttctcacaatattttaaaattctgtagaaatgttttaatatttctctatgtttttgttttttttattaaccggaaagaaagagtagacaaaaagcttttgacaaaagtgagttgcactcaagtctttttatgaacttatggataaaagtccaaacaagatgtgccatgtgcaacgcagacttacctccatcttagtcccacaaaattgatagcctatatatccatcggttcaagagacttttgcacgtacgattcaagctaagacccataaagcttttgaacagtagaatcaatcatatatagccatcgtgtagtttgctagttttcttgttttccaccctaattataaaaaactagagaaaaaaatttgatagaagcatatgaccaccacgtacccattcaaagaggttttgtattctattttattctcaccggggcagtcagctcagctaaatacaagtaaaatctatgtaaaaagaaaaaatagaagtaaaatgtgacacagtctatgggagaaaaaatgccataatattagtgggcagagtttgaagaaattataaggccttcatttaattgaaataacttataatccattttgatcgatctattattcagacattgaaaactaacggttaacaaaccacactctcaatattgtattcatatatatttaatcataatatctttaaaatattcttcatttaattaaaattttacttaattttttccctatacaattaatgtaaaggtatttaagaaaatgaattaattttattaagaatatcaaaattaaatgatgttaacgaattttttttatacgaaaagtagtttttttttttatatttcaattcaaaaggaatacatactgtagcatgtaatgcatggatgaacataagtagatcaataataaattanacattttaactgtgggcaggaccatgtccagcagttatgagatctaagataaaacctacatttaaattttaatttattatcattattttatttatttttcttatcagaaaattattcatcaaaattaatatttaaatatttataatatttgatttttaatatataaaatgacaaattcaatcaaactaatttttttacataggtaatattatataagatttaaataattttagttttaatctttttcgattataataatagttacaagttctattaataatattttagaaacgataataaattttttgatataatataatacatttattagtataaatttttttagtatgcattcttgtaatatttttatttttaaaaatgaatcaacagtaatataatatgttttattagaggggaaagaaaaaccttttatcatagtcgtaccctataattccaaggttggagggacccaccttctgcatgtgaattatctgaagctatttgccctcaggttcagctacatagagttccgtcttgtcttggatatttcagcatatctttgaatgtaccaatagggcaataggcaatagcttccacttttttcatctttttcttgtaacttgtagttgaaccccacgtacatcttctgcaagttgcaagtgcattaaattgcttgttagactagtagttctccatcaagcctcacttgccaaaaccctacacctctggatctccatcatcgacctagacttcgaggatagaaaaccatgcagtttcaaaaagataagaagagccctctttaaaaactttgtgcatagggtactatttcatctgaatatgcttcatgcacccaatgtttctcactttctcttttcaggattatatgatgtcttaaatgggagagtcaaagggctttatattgattcaaaggaaaaactctacctttggcaatccggcccggtccttaagagaaattggtgctgaatatgaatgattgtgttatagtagttaacacctttttttttttttgtatttcatccctcgttagcctcaacatcccactccttagagagtacgagaataaaaattgcatttggttaaatgtgaagggtgtcacttttgaagtgcctctacttgaagnatgagaataaaaattgcatttggttaaatgtgaagggtgtcacttttgaagtgcctctacttgaagggtgctttcaataaagcataccgtgtgctcatgtctgatgagtcacatactacaatcaagttttgtgcccctcgttttaaataaatttcttttagtggtcaaatgcaagagaccattttattttgttagatatttagacttatctacaacacgtattgcttcagcaattattggtccattcgagttttccgatgaagaagctgcatttgttcttgtgagcttatgaaacaattcaataataacgtggaatatatcaagtttgagcagtctaaggtatgctttattccttgcttcatcctttgctagcaatgaatatccacaacaatgatatttaatttaatgagattaattagtatttccttgggtgagaaaatagaagcattttaccttttaatgttatctatatatctatatctaggacaaatctttataagataatatagttatgtgttgctttaattttatgagagtatgtttttattagtgtagttgttgctttgttgcattttatagaatgtataacgtttgcaactgtacaatactgaatattttttcgccccctttgtcacttaggttccttcgctaatgcaaaattatcttccagcatttggattgttgagtcaattatattctatagaacaattataagaccgacaatgttttatggagtggagtgttggtcagtatataggcaacatgagtataaaataggggtaataaaaatgaggatgttaaggtgaatgtatggttatataaagatgagtaagataaaaaatgaagatattcgacgaaaggtaacaataattctggtgtgtgaaaagacaaaggagaatagattgagatggtttgagcacgttataagacgattattggatgttcctgttagaacaagagtttgttaccaagagctcgacacaaagagagtagaggtcgactgaaactcatctggggaaaggtagttaaataagacttaatagagtgagatataaattggcggagagtatgtcttaagacagagtggagaaaaactataagcttgatggagggttaaacccattagtatctctatgtttcaatcatttcctttttttagttattttcctcttcatttcttccctcctcttttaacccttcttttattttaacttattttttctttcttttgtcttattttccatttttcttttcatctccctctttctttgtcttttttccgatttatcattggattcatctataaagttgtcttcctctaattcgccctcaatcaatctcacttaggtgtcaaacaaacaggatctagaaagcttcttcaattttcgaggcgattctagccatggaggtagctacaatggcagttttaaccgcaatggtggtggtagtgccagtggcagtgctggtggcgatggtggccgtggtgccggttgcttcactaacttccaatgtcaagttgttacaagtatgggcacactacttctgtttgccatttttgttttgatgggaattatcaaccaaattcctctttagtccttcatgaccctacttcacataattatgggcctcataatcagtacaatggtgcttcttgtcagagtaattctaaccataattctgggcaatattatggtgattctcgtccctcaaatgtctggaccaataccaattacaagtatgctaattctggaaataatctcaatcccaatgctatgttaactaatgtctttaatcactccacttccataaaccacaattggattctagatttaggtgcttcttttcatgtaactggagaatctcaaaacattcaacaaattgagctttttgaaggtcctgatcaaattttcattggcaatggtcaaggtttgcctatttcttcctctagatcatcttcttttatctctccctataacactaaagtctctttgtctcttcatcatctattacatgtgcctcatatcactaaaaatcttattagtgtcagccagtttgctaaagataatagtcttttttgagtttcatcccaatttttgtgctgttaaatctcaggtaaccaatgatataataaccaaggctgaaaaagaaagaaagagaagtttaaatttacaatattttgtcgcaaaaagcgttagcgacgtaattagcgacggctggaatctggcgccgttagcatgagattggctccgttagcgtgaaaatgcacagaaggtcaattttcactggaatctggcatcgttagcttgagattggcgccgttagcgtgagattgcagcagaagaccattttcctctagaatctggcgcgatcagcgtgagagcggtgccattagcaccagaagtgctctaggaagccattttccactagaatttggtgccaatagtgtgaaattggcgcgatcaacgcgagaactttgatagggccactataaaaggccacttacgcgttttgggggccaaaaactcaacttcttcttccttcgtttttccaccattgttgaaggggcaaagcttcataaaccttaattccttgaccaaaacacttcacacccaacatgaaacttgtagggaatcatcctatgagttagaatccttcatcacttttccctaaaaatcatcaaatggagagatcgttttctctagggaacctcacaaaacttcgattttgacgggaaagaaggcgatttgcggacacccaagctcggaaaagttgtccactagccttccttgtcgatttagaggtaagaaacacaaattctaccgattatttgagaatttgttcttgaggtgaatagtgagccatttgagttagagctgaaattaggcttggatcctttagaaaagtatgcttaggaggttgttgtgatgaaggattagccttgaaacataaattttatggactttggaatttggctctgggaaatgtatgtgtaggaagaatattggttaaatttgttattgtatgacatgcacgagccttgatgcttgtacaatatgtgctcaggaggctctataaacggtgaaattgtattgaagtaatcgttttagccatattgttaatccttgagtttgggcctgtataatgttgaactctttgaattggttgatgcagagtctttgggagactctagtgccttggttaggccgagatagatcctgctgagagtctgtgagttgtctattaggtggttagttctgataaccttaagatagaggactaagaggtttaaatggaaaggaatagtgtttcttttcattctaacggttaagaattgttattgattgtttgtatgccttcatgtagtgtatgatacagagattactagtggttgtgaccacgaagccgggagagccggtgtagcgctaagagcaggtaagctatttgttcttgggagtgtttctcattgactgtgttccaccacactccgagggagtgatggttattgtatgtcatgatgcatgtgtattgaaatcgtgtgttactgcttttattgagaacatgtatatgatgcacactgtgatgacatgttatgtgattgatgagattctctggccagtagaatagattatttatggacttcccttggaaatgtgcctttaagtagatgatcttcctcaggcaatgtatgcagagtcctgagagaatgcttccttaagtggatgatctttctcaggcaacgatgcgaaaagtcctgagagaatgtgtcctttagtggatgatctttatcagacaatgttatatgtgtatatattgttacacatgtgttatgatatacatgtgatatgcttcatgagagccgtgatggctggttgtgtgtgtgatgtcaattttaatactttgtgccatggaagtgagccaaggggaggaaagacctctaagaaccctgagtttactgatatttgtatctcaccccgtgtgtgggaattatgttttacaggtgatgatcagcgagcggatgatagatcccagggcaagaggcccaatctctgatatggttttgtgggaaccttgggcatatattttgagagcatgttggctcatttttttttttggttatgcctgtatttgtacccctgaggggataatgcataattagtgtgctttttgtatatgttatacatctgagagatactgatgtattgtgagattgcaaggtatatgataccttattttgtaccaccattattttgatacatttatatgacttatttggtcctctgattatatgatgcatgtaattaccatacataatgtaaagatgcttttgttgatgacatttgatcacgtcattttgtttatcattttcgaattgattagtcttaattaattgttgcgcataacgaccataaatgaatattaataaaccggatgcacggggcgttacaaatgaggtcttgctccaaggcaatgttggtcctgatggtctatacaacttctccaacattaagcttcaccatcatgtgtctgcttctggtcttgcttgtatttcaactgttaaacagtcttcggtgccttcatgtaaaaagtctgaaaagttcattgtaaattcatgtactagtactagctctctatggcatgatcgtcgtggtcattccaattctcatgtactgcaactagtcttgcaacactgtaaaatacctacatctaacaaaagttttgagtttttgtttagcttgtgcagtgggcaagtctcataggcttccttcctttccctctgaatttgtttacacttctccgctagtgttaatttacagtgatatttgggaccctgcccatgtttcctcaatcaatggcttttcatactacataacctttgttgatgcattttcgaggttgacttggatttatcttctcaaaaacaagtctgaaacctcatatgtttttcaaaaatttaaagctatggcagaattacagtttaattctaaaatcaaaagtcttcaaactgattgaggaggggaatttagaccattaaaatcctttttgattgactgtggtattcaacacagactaatttgcccccgcacccatcatcaaaatggtgttatggaaagaaaacacagacataaagttaagttaggtcttaccttacttcatcatgcttctttacctctcaagttttgggctgcgttttacacagctgtctacttgataaataggttacttgcaacatcccttaagtttgaagtaccttatcatttgttgtttcaaaagcttcctgattacagttttctcaaaacctttgggtgttcttgtcttcccttactcagaccttataacaaccacaaattagactttaggtctcatgaagttatcttcttggggtattctacatttcataaagggtataaatgtctgtctcccttaggaagagtttatatctctaaggatgtgatattcaatgagttaaagtttccttatgctgccctttttcagtcctcctctctttctagtcagtctaactcttccttaactcaacattactttcctactattcctattatacatccctcaaatatcccacagcctacctcaaataatcctcaacctaattctgattttattaggtcttcccatacagcacaaacagatcagtcaaatgttgatctttccactccagcatcccatacacctcaaccatccactattgtttccacctaacagtctcaaccatccactactgttcccacttatcagtctcatcctttagtaaccagctttaatcaagtggctgattttgatttctgatactttctctcctgttatgaaacctgtgataatcagacttattttatctttggcactaactaattagtggcaactcattcagttgagtgtcaacaatgcttttttgaacgaattgctcaatgagactttgtatatgtctcaaccaccaggattccaagacactaattcttctctagtatgcaaactaaatagagctctttatggcctcatgcaggctctcagacaatggtttgaaaggcttcagactaccttacttcagtttgggtttgtgacaagtaaatgtgtaatccctctttattcatttacaagaccaaatcgcacactgtatatctctttgtgtatgttgatgacattataattactagcaattttgttcctttaatttagcaccttacctctcagttgaactcaaaattctctctcaaacagcttggattattagattattttcttggaatagaggtgaagactttggctgataaatcaattctgcttactcaaagcaaatatatcatagatttatgcagaaaacaagtatgacagaagctcaatccattgcttcccccatggcttctagttgcaagatgactaaatcaggctcagaacctttctctgatccaactctttacagatttgtggttggggctctacaatactcggccattaccagactagagatcagtttgtcagtaaataaagtctgtcagtttatgactaatccatcaaaatctcactgaattgcaatcaagagaattttaaggtatttaaagggctttgttcttcatggtctgcatctaaagcccgttgcctcaggccaaccctacactctgagggctctctatgatgcagattgggctttagatattgatgataagagatccacttcaggtgctgcaatctattttggctcaaatctcatctcctggtggtcccgcaaacaacaagtggttgctaggtctagcatagaggcataatatcgcagaacaaaggtaaagaagcaagcttcaatggagtggaaaaactctccttcgtgacctagcttcaccttcttgcttctgttctaaatgcctctaatttccccccactttttccttaaaacacagcctaacttgtgttttttatgtggtcgcatgctaagcggtcaattgcgtgcttagcgcgcttgaagagtccagctggataaatggtcacgcgctaagctagttggtcacgctgagtaggcatgtcgcgctatgtgggtctgtcacactgagcgcgatgcttcaaaccctcaatccaccttctatgtctttgcagtgaaattttacaaaaaatacaatgaacacattataaatcaactatttttagaatctactagataaaaactcaaaaagaagtgttaaaagaggagaaatgagataattgcttatgtgatttacatgtaactttacgtatgcatagcaattatcagttagtgtaaccatatcttttcttaatgaaaaattatgagctagccttccaagaagtgagacgtttaactttatgcatcacgaattgatacatgcatacttctagaagcctttttatgaagaatggagactcccaagtactttcccaaatcatttgtccaagcaatccctaaagctccaccaagtttacttagccaacaaaccaacattcttagacactactaaaaaaatagctttttacgatagttctaaggggcattttatgacagttctcaaaccgtgtttgaagccaacattgtggaaagtcaagactttcgatgacggttctccaacagtcttagaaggtccaaattctaagacggttttgtaaataatcgtcttaaaatatcttttaaaaaaattaataaaattgaggattttaagaccattttctgcaaaaattgtcttagaatgtaggctttctatgacagttttccggagaacaatcttaaaatgtttttttaaaaaaaatgaggattctaagaaaattgttttagaatgtagactttctaagacgattatgtagtaaatcgtcttagaatttctttttttaaaaaaataaaaatttttgaggattttaagacggttgttgcagaaaactgtcttagaatgtagacttttaaaacattttttcatataatcgtcttagaatgtctttttaaaaaaaattaaaattgagtattctaagacgatttccccaaaaatcatcttagaatgtagactttctaagacggttttcacataaccatcttagaatgtcttttttaaaaaattgagatactaagacgatttttcagagaatcgtcttagaatatattttttttaaaataaaacaaaaccattttctgtggtggcctcaaaaattatcatcaccaattgtgcaaaactaaatattgaagaaaagaaggcataatagaaatgactaaaacaaacatgaaccaaagtcaccacatgattggcttaatgcaagaaaaagagaaaccaggccaagtttgtagcataatctacaatagatttcatagaacaatgaaagaagatctcttataataagcatattataaatacaaccacaacttggaccattatccactacaacaattaataaaacaaaaggaataacattatgttcttccttctttttattatactaaatgttcccttcatattaactgcaagaaacttcaatataaaaatcccaattaatttgcataaatatatcaaaattgcaaaccaatgatgacaatgatagtagaaatttcccattaaattttattacaatttaaacaacaagaatcctagcttgcttcattggcatgatatggcaaaaagacaccatacttgaaacttacttgagaagtattatatacaatattctcattgtacatgagctcaaaactcttgacatttgatggaactggtttgccgcaaggaacagtgacattgcccctctggtcattggtctattattatcatggcatttctgtggagaaatcagatacaagagatttgtttacattcttttctttaaatctcccaactctttcattgtgtcatagaagaatatttcacaatagtaaacatacaagtaactagtagcaagcatcacatatccactacctaccatgccataggagcattatgtttaagtttatccctgtaaggagcaaaattatcaaattccccttccctttcaagtgaaaaaccttcttctagatcaagactccaatctagcataaatggattacaaagatagtggaaacatgtacattgtgagaaatgaaagaactcatgtcagacattaatacacaaacacccacttgtataccaaatataatcatattgtatgtgtgggggcatgagtattatggagaaacttgtcaattaaacaaaactcttcactatcataaggaagtggagatgtatcacaccgaagcttcttatagtaatcatcaatagaatcatcattgttggcatgaattccaactaatcttgatgcaatttcaatgtcttgaagggcttctaacattttcacctaaaacaaaagaaaggccatactattctaattataataaataaaggggaaccaaatgtgccaatcctcagtagcaaaagtcatctggaacagtcctaatagaattagatgaaaataataggaatacttcaatacaaccaagaggggggtgaattgattgaaccttggtatttaaaaattttcaaatcagagtttccacaggatctttatcactttaaaaattgttttgaaaccaataatcttatattcaatcaaattcctctgtcaagaaaatcaatagacaactgaaatctttttgtgcaaataatttgattcacaaaccaaaacaataaagagatgaagagattagaataaagatcaggcacaatttttatattggttcacttcaaacactatgaagctacatccagttcttccactcaacactagaatgaagttccactattgcaaattaatgttcttacaagatatcacaagcctctctttatcaaccctagataaagttcataaatctaaaacactattagattcttagagacccacccaaactgagaacactatctctagttatcatgcaagaaacccatttacaataagccaatctttacagaaatcaaataacagatttacatccacaaagaataaggaacgaattcacctgataatccaatggacaaaatgcatatgtatgattcaccaggttgaaagaatgaataacagattcaatgcatccctttccttactctttgaaactcaatgatgcttcactcttcaaatcaaaaaacccatatgaatttttgtgaagccaagacgtttttgaactcagaaaactcactaatgaaagctcatgaatgtttgtgattgcccagaattcgaatttctcaactctttaaatcacagagcaatgggttgtatttataacaactttataactgaaaataatctattaaacacgttcctgtaatcgattatttcgcatatgtaatcgattaattcaagaatgtaatcgattaaagtgtttataatacgttctgggtttgagctatgaacattataatcgattattccgtcacgtaatcgattaaaccagacactcatgattttccaaatacactgagtaatcgattactgaatttggtaatcgattaagacagacaaaccgatattttcaaatgaactatgtaatcgattaaaacaatttgtaatcgattaaatcagcagaacatgttagtcataggcatgatacataatcgattacgaacttctgtaatcgattaagacaggaagtatgttatttcaattttagcctaggtaatcgattaattcgatatgtaatagattacattattcttggtttgttttccagaaggcacgaagaacaaaataatcgatgtcaacatatctgtaatcgattaaaacaggaaaacttcatttttccaaaaacttgattttaattttgcctcaattattaattgcttttgtattggccctcattctaacaatcctaaatgaatggttatgcatgatatgcacattggtttatcagataacacatcttcccttttacatgaatcaaattgatcttcaagcttccaagacacttttgaaatgatgcatgttgaaagcacaaaactccaaagcttgattccttgtccatcctttcatgactcctcttgaatcaacattagataactttatatcattcatatatttgacattccttgaacattattgaaacaaactaaaaatttcacatgtgttgtttgaaacaaactataccttgcaatattcatttggtattgttttgacactcaattgtcaagtcaatgttgagtttcaaggtcttcgacaaaatgagagagaacttgaatgcctatgaggttagtaaattgcatgaaatctatttttagtgggactgtaggaggatgcagaaaaatagatgaaactctaaatgatagtatttagtattttcacaagtatcataccaagctgataaagataaaggaacggaaaaataacaaaatgatgtgcatagcaacaatagtgtatcagtgataatatttgaccagtatctctcgaaaccaatatagattctgaaaatgtatctaaccattgacaacctccattatgcaatgacacttggcttgactttacaattgttttactagtttctactgagacaacagaaacaaaaataggcaatgtggttgtaaaattaaataattaagttgacttctacatgactatatcaagtgccacaactattcaccaaaaaaaaatcaaatgccacaacaaacctttataaagttgttgctcaacacttaaagatccccaaaaatgtgtgctttgttagactgtaaagaaaataaagtttatcaacatgtgaataaaaaacattgagcataaatctacaacatggttaaatatcaccttaagagcattttgaatagattgagatagggacaacattttagatgcatcttggagtgtaaatgatgaaggcaataaggaaagagaatcactcttgcagcattgttattttagaatacaatgcttagaaacaattgtcttccaaagagtaaatagtaaatataacttacaatgatttttggaaacaatgtcaagggaattattgcactacatcccacatagcataaagattctcacataaattaaccaaaatttcatcacgagagttttcaaattcaagaacacaatatatgaatgtatctagttctggctaggacgagagagagaaactggtaaaattggatcagtcattatcatccagtggcaacaatcattatcaagaagaagaaacaagtagttcaaagtatttatttcacatatctagactgaattggattgcgcaaacttaggcttcattaactaagctagggaaacaagtagtacaaagtatttatttcacataaatctatgatcctaatagttattatttagaaaaagaatcaacataggagtaatttggctacctgcaagaattgaatgggctggggaattccaagtttgtgcaatgtatcatatgtgacaaaagaattttatagcatacaaaaaaatatggcgaaatgaatgccatggttcaaaattttgctttgccaaaagatataggaactaagttcaattccccaagaacctcgccatccttcacaagtccattacacaaagattggaagaaagatccttcaacagccaaaccactagtttcaacaatttccaagtaattctaaagtttttctcgcaagacaaatatgtcaaataaagctcatgtaaccacaaatggttcatatataatgaaaccaatacaatttaggataagaatgataccttctaaaggtcattgattcagcttagcacttgttgaatccaccacaggaccaatgtaataactttcttttgaatcacctgattaacattagcaatgatgagaagcttgccttctttctagacaatattgaaccatttcaaaaaggaacaatcatgagagcttaaatttttttacattatcggtcaataaaaaatagttaaacatgacttttaaatagttattataagtgttataataaacttatcatatacaatgatttagagcaaaatgagatagtaaaaaatcttttacgacatgcataaattgtttactctagtcataaatatttttcagctttgaccattatatcgggttggtatggatctaatgcaacatatggccaagaaaaagaaaaataccttggaggcctaaagtagaatcctgaggagtataacctctaaattccttgctggccaacttcattttctcttctagtactggaagtgagaagagcctcttactctcctcaaatgctttgaccaagtcattctccacgccatgtttcacaaggtaaaagaaaccatactcaatgcacgcctatatatatatatatatatatattaacacagttcaacaatgtcaacaatacaatgtattatatatgacaaaataaagaacaaaataaaaacttcaataattaaaaatccgaagttgtgacatattgtatgaaatgatttaataattaaaaaaaagttaagaaaaaaagaaataaaaagaatgagaaactttttttttctttcagagagggtgagaagagaagccatgggaatagactagagatagtgaagtgtgaagtagtcactcacagtcatcggtatgagctttatttgttgttgggtgttacgggaggggacaggggacataggtgcacatgccgtggaagcgccaaagttggtaccttacgggtttacaattgggtgtcatcaatgccttaatctatgtgttgcctatccctcttctattagtgcaccccacatgttactatcttccgctgcttccctgctttcaattattctcttcgatccagtgtgttcgacaacatcaaactattttaatgaaatccatgctagaatttatttcctatcaattacctcctcaataaagccatcacagatgggcctatcaacaatgactttaaatgactctaattagtatctgtatcaagtttttaactcttttgtcatcatcttcttgttcctttgttgcgacggaggcagagtagaaggagcttctggagacagtggtttcgaatcttccgctggagaagagctcgaaggccacgatggcgacgaggtttctcttggattgtagcaagcgacgaacatactgaacgcttctgaaggatgtagagacgcgttggagaagaagatagggttgcagctcgaaaaagcaactctcgacgaccttctcgtgccgagttactcgtacctgaacgaaacactttacgacatcattgcttggagaggattttgcatcacttttttgctggcgaacaacttcgcagatttgcccccacgcgacgggcatgtccaaaagggtccttctcgcaatctggtcttggaggcattgacagacaggtggccttggtcccttgcacgacttgttgggaaccctagagggggggggttagggagtgaaagtgaaagggggagtgagagattagagggagacatcaaatattaaaaacaaaggaaaaccttctaagaatcgtcttagaatcacagcctttcaagacagttttcgaaaaatcgtcttagaatgacgaaaccgttgtagaatggttgtatttatttataaaaatatcaccgtgtttctttctaagatgacgtttttatcaaccgacattaatcaacatcataaaaaactattttttagtagtgagaaaggaagacatgcgacttctctagactcaccttttgattcaagctcctgcaaaaaattattaaggatggtttggatgatattaatgtgatccaacctacccaagataagatcatttgcgaaggctaaggcttgacacaaaataatgtgaccattccttttcgacaaataggttttcaaactttatgagaaaaaataacatatcatttgaagctacctcttaatacatgaatcaaaaatgtaattaagaggatagatgatttccatgtttgacaccaagatggcttgaactccttcaaggctttgccattccatgacacaattattaaatacattattcatagcactctttttttatttgataaagtttattaaaaattatgaatggagtatattaaataaagagggggacgtatatatatttgtaattttcaataaatttcaatcaatattagaaacttattagaaagaatgtgtaagaaagtatgctactagcatttctccatatttttataatgaataagctgtatatagcaatgagtaaagtcaaatacataaatgttgataaagcttactcctttatgaaattatcaaaacaattaaaaacaggagctcacaaaacaaaattaaaaattaaaaatagagcaaaatttaagaaataaaggtgataaaattcagtagagattgacatctagcccaagaaagaaatacaatatttattcttagatttgcttattgataaaaagatacgtatgttatcatcacaagttcctttggagtatttggaggaataggaatgatacatgctttggaatggacatgaggagaatgtaattgggtggtgaatagatcgaagctcgttttgacagattggaatttatcaaataagctggatgaggaatgatactgtaaagtgcaatatagatgcagcgttttttgataatcaacattgcacatgtctaagagataatatgggacgttttgttcaaggaaaagttgaagcaactatgacagttgaaagttaaggaaagcgaagctctcgatcaattcttcaagcggagttatggctagctagtatacagcaagacattgaatcttcatcatagaaacatactgcaagcaaattgttaaccaacttcaacatgaggaggaagacatttctgagtgtggaatgattttacagcaaacaagagaattaattacaactcattctaatttacacaattcacattgcttgtagacattctaatattgtggcacatactttggccaagaactctattaatttatgagcaagatcatgtattacatgctatccctcattgtattcagaattgcagaaaaaccaaaaaagtagtagtcaataattaataaaaaaaaaagaatgagcttttctaacctatacatgtcgtttcttatatcactaaatctacttagagaatatatcctaaatcctaacaaaaataaaatataaaatctaatctcaaaaaataagaagcttaattaataagtttagagggaacaatatctcccaagataattatactcctataattaaaatatctcataatttgacagaacgaatccattagatagtatgaaataataaccatcagtaacatgaaacacaaatcggaaatagttcatcattggtaagaaaagaaaaggtaaggatgggctagactcattagttacatgaaagccagtatatatttgaaaatccacataacattaaagacacaataagacatagttgacatccttcaaaccatgaaatccagccagtgcatattcagaatctaatacaaaaggtacattaactttttacaaacttgcagctactcactcatacacaactttacatgttgtagagcctcttggacatgagcatagttcctttaccatttggaactttctagattcatttaaggaaaagtaactctgaattgtcatggtttgtagtacttttgcattctgtataatatatttagcaaagctaagctcacatttcctgtctccataatgtctaataaggcatgttttaagctgcgacaagaggcattccgcaacaaactctggggcctcccaatcatcatcacaaactccttctctactagacctaaaagtctgtcaacaatataaataaagttaacaaaagtaagaagaatgagacctaaaacaaacaaaaagaatccgcataaacaaattaaacaaaccttatcagtgataagattttgaagcttggggcaatgttggagagcctttaccaaccaatcccaattccactgccacgtattgtagtcaaagataacctctaaatgggttaggctgtgaaaccatggaacatcagtgaagtaggcacacttctgcttaattcaattcacagagacaaaaacatgagaattgaaattcatttcaactagtaggttttactgaaaataaaagtggtattagattactataccaattccacacgtagaaagtgtgcgttgtgaagtggggttaagggaatggctacgtttgaaacattggcttttagcagattgggtaaacatccaagttcttccttgataaagtgtgccctaaatacatatatgtgtttggcaaacaaatcctctaaaattggacacctgaagagaagcatcgcgacacattcatgtcctcggaaagagatcccttccaagtgaagggttttgagggagggaaaatgggcatagggaagatcgtagtcaaggtgtagatattttaatttgagaatttcaagggtggtgcaactaagaatgcagggaggcagtttcatgtgaatgaagaggcccatttcaaggtggagatggcgtaggccgcgttgcacaatggtgtggatgagtttattgatgtcggaggggtcacaagggaaagtgctgccacacttaaggagaaaagtgttgagggggagttggatcttttgatgggagaggagggagtagagggagtggcaaaagagttcatatgtggcgaaggatcggtccttgatgtcaagggtggagagggagcaccataggggtctccatcttcgtgaaaggacactggtggcaacgaggtctttcatggggagaaagagaggatcagatacagaataaagtctgacaatttgctgattctgtcctctgatggattttgtctctgcgaggacatctttgacgttgtgggatcaaagaaggttgatgaaaaggaggatatgaaatgttttggaattggtgagaagcgatgaaactttaatatgtttttatagttgaaacatatatgaattaaatgatctatttaaattaaatgacaaataattaatagaataaattttgtttctttcaattcaaaatgttaattttggaaagtaataattgttgatgttttctttccgctttggctacaatttaataatttaagaattctttctcatttgattttgttttacttggctttttagtaaattaacattgtccagaattaattaattaattatgatttaatgaatattaatatttttttcttattatatactattaaatcatttatcgtatagtatgaaaaagtgtagatgtgaaaaaaatgggtctactttgtccaactttttttacttaaaagcatcttttactttaaagtttttttttttttatnnnnnnnnnnnnnnnnnnnnnnnnnnnnnnnnnnttgaagttaaaacagctttaaactctttttttaacttcaaatttaaagctctttttatatataaaaaaagactttaaaagtaatagtagcttttaagtgaaaaaagatggacaaaccagactcatttctttcacatatacactttttaatactatacaataaatgatttaaaatatatactaagaaaaattatttaatattattaaattataatcaatttactaattaatttacgacaatgttaatttactaaaaagccaagtcaaacacttaattattaaattgtagccaaaacggaaagaaaacatcaacaattattaatttgcaaaattaacattttgaattgaaaggaacaaaatttattctattaattgtacaaagacgattctacgatcgtctttgtatggataaaagaaccgtctttgaaaaactgatttgtagtagtgtatgatgacctctattatgttatttttctcttagtctgtctatgtgtgtttacatgcatggtctatcccaagctagaataaaataggagggttggcgtctggggttgcaaaccgaccgtaaaaaatcagctatttttatgtcgtttgtgaaggacgatgcaataaaatgtgatgggttatgtgggtagtgcaccttttcccagtttgtcgaacagtatgagtctatgatacccttcctatttttttagcattttgttgtttatcaagtcggtgaaggaaaaaaatatccaaagtccgtcccttttgaccaaactctcactattctgctgcaaaattttgtaaagctgtctaaattttaagaatacgaatttaacacagtaaaaaatttggtaactaggcaaatctttgttttgcatttttgttttgaatgatatgaatgatgattgaaccttccagtgtttgttcggtctaggcaaatcttcgcgaaccatccggcagagaataccaacaatggtctagttggatagaaagatttttttttttgttttaatgttgttacggatctagtatatgggctggaatgtgttaatcacagaaagacccattaagggttcaatgctttagaatcttaacagcagttaaggagatctaaaatatgcacgtatcagtcgttgaagatatcacaacaaataaagatcgtgatcttagcagttagagattttagtctaataaatcggaagaaagcatcagcaccaatagaggtaattcacttataaataggggttatattcatggagaaaggtacacactctcttgatcttacttttccattaacactgtgcacacacctcaccaccgttggatgggtattgtttcaatagtaaagtgcatagtgatcatattcctagaggtattttcttctataaatacctttaagagagttagtgatccaatatcaaaataccagcgaacttgttagacattcttgttcataaaaacagaacaaatgttatttagtgtgggcactcccacagtggtttccacatttttttttgccgtgtgtagtaagaagtttaacttacccaccctagccttgcacaccgtagccttcttcatggtatcatcattcttatttttccaaattctccaaacactctaaccaatttattaaggaactaaattacaatctttttatcaataagcaaatctaaaattaaatattgtatttctttcttctgcaagatgtcaacctcaaccgaattttataaccttgatttcttaattgctctaattttatttttaattttgtttcgtgacttcccgtttctaattgttttgataatttcataaaggagagtaagttttattaacttttgtgaatttcagctgattaaaagaaaacttttgtgctactcatcgctaaatacaaattattcattatatagaatttggagaagtgtaactctctaacacattttttctaatataatttttaatattaattgaaatttattgaaaattacaaaatttatttgtacattgtagctagcctactgtagctgcttataaagctttgcagttgatgcttatacactgaatagaaactttgttggacttatgggaaggagtaatggatatcataattcacaactacatatgccaacatgctttcaacactactacacagaaggcctacgacgacggttatttaggtcatacgacgacggttgttgaatcatcattgttgtgtgtgtcgttgaaaatggggtactttcgacgacggttcttaaaaaccgtcatcgtttctaattttttattttttaaataaaatacaaacgaagatggttattaatgaaaaccgtcatcgtatgtcagcatacgatgacgtttttttcttaataaccgtcttcgtttgcatttatttcagtttaatttttttaaaaaattaaaaacctacaaagacggttattacaaaaaaacccgtcatcgtatgtcaacctatgatgacgatttttccaaataacagtctttgtttgtatttaatttcaattaatttttttaaataaaatacaaacaaagatagttattaagaaaaaccgtcatcatatggtagcatacaatgacgattttttcgtaataaccgtctttgtttcatttaatttcagtttacttttttttttaaattaaaaacctacgaatacgattattaaggaaaaccgtcatcgtatgtcaacatacgatgacggttttcccctaataaccgtcattgtttctatttatttcaattttttttattaaacataaacgaagacgactatttagaaaaaacgtcatcgtatgtcaacctatgaagacgattttttcttaataacagtcttcgtttgtatgtttgttattttttaaaatctcaacatttatgaacacgatattttgttaataatcgtctttgtttgtttataaatttttttaaattattttacacctacgaatgcataacatacaatcattaaaaccacatcatatattaaaaacatttaacactttctattgaaattacaacatcacatcacctaaaaccattacaactttcagattattctaccaagactatgttagaaaatgctaggaaatacaaaacactacagaccacttataatatcctatgatgtaactcaccagagttaacaatcctgagagttcaaaagggaaccaagaatcaattattagctcaaactagcgatgaaccttacagtcaaaaaagaaaggatctgcctaaaaatggataattaagcaacatcagttatgcattggattggctagttgcactagtcttttataatattgttgcctcacctccataaacctgtgaagatagcaaatactaaatcagagatattgtgaacatcggtttagctggtttgttaacagtgattacatgatgggctggtctcataacgcaatatagaatccatagttagtaaatcacactgtacaaattaattctttcaattgcttaagtcaaggcttatgattgaagctatatctaatacactatagtctggctaatgcattccacaaacaaaatttactaactaatgacaaatatctttgtatggttaatgacatttgattaaaagaagttcatttttgtcaaacattttaaccctatgtagaaagccattactgtacctgagcctatcaaggtaaaaaaaaaagaaggaaaagaaacaaaatttacctacggtaaagatcctttgggccaaaaaagcaatggccttaatggtctttccaagtcccatctcatctcctacaataccatttaaaccctgaaagataccaaaagccttcaaattaacaaccaaatgaaataaatgtttgagactttagcacaacaaaacaacaccaaggttattccttcaggtgatcctgtcaaatgtaaactcaaactaaagaaaaactacttatgttttataccaatatcaatgttcaacaaaaaggaactaatcacaagtagccacatagatatcacctgaaaattgatgcaccttcaacctttcacatcaccccaattacaaatttataatgcataggttcagttcaatacatatgcagcaacaaaatcaaaagactaggacaatgaatagtattatagtagtgaaaaggaagaaactacaagaaaatatataatagtagaaattgagtaattgagaaagagagaaattgattgttcctcaaactattgatttagtacctatcaacaaaaataattctagaaatttaaagtataaatgattttattgaaaagtaaaaaaattaagttgtctattatttcttttacactctttatatatatatatatatattaaatattttttattaatttttttaatcaatattctaagagtattcattagcaagaaataataaaatatttggtaaatcatgatgcatttgtgccctttatcgtagcagtccacaattgtactagagccattggcccaactgtaagccccatcacatggtcatcatttcaattttcaatcaacatttggaccaaaaaataaaagttactatggtcacaatgatgcatagttatcacctatttaattagttctcttgtagacaattttcttatataggtgatgttttatcacctatttaataagaaaaagatattttgatacaccaatttctaaatatagcagcaagtgacatcagtgagcccaagcaaagaatataactaattcgacaaaacatcccctgaaatatggacattccaagatagtatataaacatgtataatcaccataataaaataccaatcaacatagaacctcacttaggccaacaaaacttcatataactcatacaagtctataatacagtgtaaatatagagccactagtggtgataatagcttggtcttattccttagccaattgacggtgtttcggcaatccaattggcaatgatgaaataattacgcagtaaaaaaataaagacatttaatttgaattgaaagaggagttcattttattttcattatctggctccagcaaacattattgtgtgaagaaattaaagtccccaagcttattttatgaagaattgttagaaatcaccttatagagacaaaacaccataaacctaaaagatcccgagttacctaaagtacccaaatttcctaagattactgaattgcccaagcccgagttgcctaaggttcctgaattgctaaagcccaaattgactaaagtaactgagttgcctaacattcctgaattgcctaagtccaaatttcctaaattacctaagccaaagttgcctatggtccctgaattgcctaagtccgaattgcctaaaatacctgaaatacctaaggttcctgaatttcctaagcttcctaaaacattttcaactaccaattcttcagtttgaattattccttacgttgtcttgtcctgagatcaaaattggttgcattccagtacctagttcatgttgtttgatggatgtcatttgatatatgttaattttcacttgtgtataatatgtttattaagctaagaaaaccatgatattattaatacacttatgtgttattcctttttccatatattctacagtatgtactatttaccaaatacatacatgtacagttttgtttggaattatattctcacatacataagtataattgttttgacatgactaatagtaggttttttagtcatccattactgaaagagttcatttaaatctcagagttactaattctagtcccaatcactagcttatgttgtccatctttcttgctaagaggtggtactaaaaacaggtcataacaggaattttgtttcaaacctacataacctatatgcatgctaagaaatatatgcaaggtattcaacctaagcatggcataataaaccattttatatgttatctaattagtaaacactgtcacaatatattctaaaaaccacaaccaaagaagacgaactattcacagaaaagatacataccatgaatcaagagtttaattccctttcctgcatcacaatccacgttttttgattactaaacctgtataacaagacaactatttcaaatcaaatatgcaaaataaattgttattctcaaagctccagtccagaactcaccctaacaccatgacacaagataaatcattgaatattttattgagctaaaaaacacatccatgttaacctaccgatattatgaaggaacataggtcagttcaattacaagttacaatttgatttactcaaaccaaagacattcaggcccaaagtttatctaccgttcaaattcagcagatgggttttattggtgaattgttgttgatggttcctaatctggcagtgttaagacctttatgctacttgtgttgctgcacctgtgggcttacattggatcaaaagcctgaaagatccgattcatgtaatgacagttttccacatgacaaatatcaaaatgacttttatggtcttctacagaagaccaagaaaaaagtttgttgtcaaagtgcgcatgcatgaccattgtttccccttttaaatgaatcgcaaatgtaattagctaagaggggagaaagagaaccacacctgggtcaaattgagaagcacagacgcggaatcagactcaatctttccctaaatgttgtgcttcacagacgtaggctcaatccctttaacattttctttcaacacagaaagagattggtcagctatggagctttgcagcctaccaacagcagcgacgtagggctctgaacgtcctgcaggctacggtgatggcggtcaaagtcgtgcaaggtacggtgaagggtgcagcgatgtctgtaacgccccgattcactaatcagggtcattaccaaccacaattcacaatcaagcagataatcaatcagagtttaagcagtttggaagcataactaaaaagtgacatcatcaagggtcactatcataacactgtacactataatatggtgaatatacatcaaagtttctctatacagtacaaaactatacaaatatcccatcagggtacatcaaaatccataaccaaaaccaaatacaaaacatctgagcaacatgctcaagtcctctagcctaaggtgtccatcagcagctaatcctgcatatgcttcttgccttgggatctctctgctactctggaagaatcacctgcaaaacatagccccacacaaggggtgagatataaaatctcagtaaactcagggcccttgaaggtatttccttcccctggttcactgacaacagatacacagacagaaacatcataatcatcatggttatcatcaacaattcattcaatcgacacataagcagtcaatgtacaaccatctgtcaatatccatgtgatttcgatggtcatcaccatctatcacctatcatcatcatcctacggaggctttcatctagatatatatgccgatccccactcacagaggatccaatatatactaggacatctcatggcaagacatcaccatctatcagaggcacctccgaaaatatataggtacaaccacgtctggaggactcctatataccgggccgacctctatcatgagctacatctcatatcctgtctcaatacaattcgcctgaggaggctacatctgtgaatataggaacatctcactaaggaggctacctctatatcacaggaaacatctcatgtcaggcctatatccatcacatgtcatctatcctattaccataggattccataatcaatcatgcatatctcaagctaaacaaatcatagctatgcatcataatcacccatctctgggtccagatcaaatgacaagcatcacagatcaaatcacagtcattaccctctcatagggcgcaatcatcactcatcagccaatcagaccaataaccaatcaacaacataggcataacagcacaacagaaccatcaaccccttaggagtatggtggaacacagcaaaggaattacaagcaagaaccaagagcttacctgctctagccaagtcaccggctctcccggtctcgtggtctacaccaccggagctctcacgctcacgtcctacacaaaacaagcatataacacattaaatacgatcctaaaccgttcaaacgaaaggaaactatcatcctttctctaaacatatactaatcactgtacaagtgatctcagacccttcacaagggtcctacttagcctacacaaggcttcagagcctctattaagactctaatcaggctaacataaggcatatctctgcttacaatatgctaaacccaacttctcatcatcaccagtttcaaccggtcaatctcatctatatagtctcctgagcaactttgttaactgctctaaggtccagactagtcaactagtcaaccttttatctctgctcagactgactcagagccaaaatcaaacttcatcaataatgatgattcaaggctctaacttccttagaacagtcctctgagcataagactctacagagtccgagcctaataacggctctaacacctccaaaaacaccccttaagataaccccaaaatcacaaaatccaatccacagaaccaacagttagagctcgaatttcttacctctgtgatgttcagaaacaccagggaatcgctttccctaaggtagcttgctcaatcaaggcctcctttgcctctaaactccgagctctcaaaggttctctcagagaaatcaaatctcactgtttctcagctattctcaagaatcaatcgggagttttctctcctctcggggttctaatcactttctcagttgggtcggaggtgtttagatgaaatatggaggagatatgaagctctcaaactcatcaatggaggtttgggacgaaggaggaagaaaatatccaaattttcgagcttctgggccttttataggcctctgctgtgactcccacgcttcaagcgtggactcccacgccccaagcgtggagttctagacaaaattccacttctgggcaacttcccatgcctccagcgtggcttcccacgccccaagcgtggattggcagacaaaatggcatttttgggctgcttcccacgccccaggcgtggcatcccatgccccaagcgtggaaccccagaaaacccctaactcagcctatttcatctctttctcaagcctttcctctgaatactcttaagcatatttattatccttaattatgggcttaatctaggcttaattacatgcttaaaattcaagatattacaatgtctttcaacaaaggctcgaggaccaatgtctatctagctagggcacactttcacacttatgtttccttttttttaattgaatgttaaaagcaacgacggttaaaataataaccgtcttcgaaatgccactgcttcacaaacgaccacggtttccgtaatacccgtcgtcgtttttatcctcatatttacattaatgccaccgtccaccatactaagacgttttcatacaactgttgtcgtatgtgcatcgtcaaagccattatttgtagtagtgcaatgagaaactaggaagtatggtttcagttcgtacaccacttggaagccttattttgtttcatgtttaagcttttgacataagaattatgaaatataactcattttaaatattataaaaaaatattccaattccctaacatatctcttgacttagtttctttcctatctatactcttttctcttaatacataataaatgattaaaaatatgataagaaaaaatgtctaatatttcattaattttctgtttcaaatgaaatttataatcagctttttcatttataaaattaaatatttattaattaagatggtaagtgtgtattttattttattatttattaatttctaaaaaattattatgatttttataaaataaattgattttatcaaatcttatattattataaattaatatatgttaattttaaattaaaaaatataaactttttgtaaaaatattttatcaaacaacttttaacttaaaagtagcatccaaaggaaagataatgaaaaatatcaaatagctataacttaaaaaataaagctcatttttttaactatttaaagtaaaggtggcttttaagagaaaaaaaaaagttggaccaaacagacccgttttttctcacctacactctttttcttactatataataaatgaataaaaatatgataagaaaatatttaataattcattaacttatagttaattaatttattaatatagtacaatttcattttacttgattaaaagtcaagtaaaaaaaatcaaacacggaagaatacttaaataattaaattgtagccgaaaaggaaagaaaatctcagcaattatttctttcccaaattgacattgtgaattcaaaggtataaaatgtattctattaattatttatcatttaattttacatgtaacatttaattttattctaatttaattcatatacgtttcaactactaaaacacattaaagtttcatcacctctcaaactcagcaaataaaaaaaaaaaatctcatcatttccaaaacatttcatatcctatttatcatcaacctactttgatcccacaatgtcaaagatatccccacagaggcaaaatccactagaggacgaaatcagcaaattgttaaactttattccatatctgatcctctcttctcttcccaacacagacctttttgacattaagggtgagcatagattggatttttaagaatctaattcatatccaatgcatatctatttaaattgattggattttaaatctatattcatttttttaaaataatttagattcaagatccaatccatataaatggatatggatttggttatatccaatttacatccacttaaatgttataaagatttttttttttacaaatgttagttattaaattctaaaaagtgaaaacttagtatacgtccatttaagagctattttcaaccgatcttagtcaagactattttcgattgatcttggttagtatatttttggcctacctcaaccaggcaatttcgacagatattggtccagacatttttagaccaacatcaatcaggactatttttttgctaacatcagtcaatgcattttttgtcaacattggtgaaggatgtttttactcaatctaaggtagggttactttttggttatggtcggctagggtttttagtcaatgttggtcgatgatattttttggctgacattggctagggattttttatcaacatcaatcgtgactagttttttgccgacattgattagaatttttgtggctaacatcgataagattttttttgctgccccgggcattgaatagtcaaatcagaactggtacggacaaggggaatccggctgtttaattcaaacaaagcattgcgatggtccttgtggatgttgacgcaatgtgatttctgcctagtgatctgaatgtcaaagtgaagaaattcaaccaagtgcgggtaagcaatttgactagctcttcgataagttttggttctttgtcgatattatcatcgcatggatccacgtcgaaggcttcatcatggcgagctgtgtacattgtcaatgtataaagggtagactctatttgtgtatagataccaaccctttgagcctaacctttagataaacagcatgaagaggataaaatgatagcaagtcctataagagcaaaaaaagtaggaaaatccacttaaaagtttctattgctttgtaatccttgcattgctatttgcatgtctcattgaacttgctattaaaacttaaaagttacaaaatgatttcaaaggaaaacagtttctcattagagagtcgggaagctggatcctattttttactttctgtgtgatacattgattctgtattttgtgtgggatctattattatgatctaaaattagaagtttgctagctagatggttcacagagcaaattatgtagagtatgaattcaaagttcactaaaaataattaaattatgattaaggataagtgggcgtccaagcatataatagtcataccaaaatactgaaaatatatcatagtcattgatattttttggtcaactttaaccatgactatttcttttggctagcgttagctaggaatattttttgttgacatcaactaggattttttcgaccgacatcaaatgggggaatttttagccagtgtcaactaggttttcttggtcaatgtcggtcgatgatgtttttaagctgatgtcagccaaaaaatagtatcatctgacgtcgacataaaaaccttacccgacactgagcgaaaaacctacctgacgtcagtaaaaaaataattttgatagacatcgacaaaaaaacctaactgacgtcaatcaaaaaatcatctcggctgatgtcggtcaaaaagactttggttgtcatcgaccaaaaaatagtctcagtcaatgttggctaaaaaatcttaccaatattaaccgaaaaataggcttaaccgatgacgacttaaaatcatcattagttaacgtcgaccaaaataattctagacaacatcatggctcctgacaaagttggccaaaaaaactagccgtcattgtccaaaaaattgtattgaatttaaaaatccaaacaaatatccaattcatatccaattaattggattggatttaaaatccaaaaagttggatttggatatgaaactaatccatttaaatggatttaaagtggattagattagattagatatagattattttatggatatggatttttttgcacagccctagtagccaccagtgtcttctcacagtggtggagacccctatggtgttccctctccacccttgatatcaaggaccgatcctttgccacatacgaactcttttgccactccctctactccctcatctcccatcaaaagatccaactccccctcgacactttccaccttaattgcggcaacactttcccttgtgccccctctgacatcaataaattcatccatctcgaaacgggtctcttcattcacatgaaacggcctccttgtgttcttagttgcaccacctcgaagttttcaaattaaaaaatctataccttgactacgatcttccctatgcccatttcccctccctaaaaaatcttcacttggaaggggtaactttccagggacatgaatgtgtcacgatgcttttctccgagtgtccaattttagaggacttgtttgccaaatacttatataaatttacaacacactttatcaaggaagatcttggatgtttacccaatttgctaaaagccaatgtttcaaatctaggcattcccttaaccccacttcataacacacactttctacgtgtggaattgggatagtaatctaataccacttttattttaagtaaaacctactaattgaaatgaacttaaattctcatgtttttgtctctatgaattgaacagaagtgtgcctacttcaatgatgttccatggtttcagagcctaacccatttagaggttatctttgactacaatacatggtagtggaattgggattggttggtaaaggctctccaacattgccccaagcttcaaaatcttatcactgataagctttgtttaatttgtttatgcagattcttgttgtttgctttaggtctcattcttcttacttttgttaactttatttgtattgttgacaggtgtagtagagaatgagttagtgatgattattgggaggccccagagtttgttgcggaatgcctcttgtcgcagcttaaaacgtgccttattagacactatggagacaagaaatgtgagcttagctttgctaaatatattatacataatgcaaaagtactacaaaccatgacaattcaaagttacttttccttaaatgaatctagaaagatctaaaaggtaaaggaactatgctcatgtccaaaaggctctacaacatttaatgatgtgtatgagtgagtagctataattttgtaacaaattaatgtaccttttgcattagattctacatatatgtgcagtagctggatttcatggttcgcaggaagtgaactatgtcttattgtgtccttaatgttatgtggattttcaaatatactggctttcatgtaaccaataagtagtctagcccatccttttacgacttacgacttctgtttgcccatccatttccaaatgataggaagcattgtattgtaacttggtcccttgaattttgaatcgatccttccgaaggtagcttaagaacaaaggattatgataagttttgatcattttttggatcctatgcaagtgacacttttttcagaaaaacgggatgctaaggaagtggtgaaaaacttggaagcaagagaaacaaagtgcacaaacttcgtgaggcgatcacagatgacccaaatagtggtgtggccgaaataagaaagcaaatggggtgataaagtatatcgttaggttataccaatcgcgacagggaactcgtaaggcttgcaataaccccttcttttgtggtatttgctctgttgatagatcaagcaactcataatgaactttttgatgtctatgtacaggccagactaggaaaatgaggcaacaattctagccaaagtgggtttgaggcctgagtgccctacaattgggatggagtgatattttgtcaataaggactggcggagatcctgcactggaggaatgaagattttatcattcaaaacaagagaccatcctataaatgagcatgttgttgtttctgaggatccgtggtgtactcctgcaacagggaaataccctctgggtcagaggaatagtaacatttcagcatgtccaataaagaaagaatgggggaaaacatgaagacaagaagtgattttggctcttgaaatttccccgacaaggcatcaaccactatgttggctttactaggtttgtaaaaaaaattcaaatttatagccttgtaattcacaagcccacttctgtaactgctcattacagaaatgtgtcccaccgtcactgatgagcaccctagggactccaaaacgtgagaaaatatttttcttaatgaacttgacaactgtcttggagttattcttttgtgtagcaacagcctcgacccatttggaaacataatcaacaacaactaaaatgtattcattcccaaatgaagaaggtaaggggccaataaaatcaataccccagcaattgaagacttcaacctcaatgatgttttgtagaggcatctcatttctccttgagatacctccagtcccctggcactgatcgaattgaagcacatgatcctaagcatctttgaatactgagggccaaaagaagccgaactgcatcaccttagctgttgtctggtctccactgtaatgtccaccacaaggtgaattgtggtagtgccacagaatgttctttgattcatccttggtgacacaccttctcaacaagttattagtccccagcttaaacaaataggggtcatcccaaacatattgatttgcatcactaagaaatttcctccgctgatgccaattgaagtcaaaaggaatgatcctagccaccttatagttggcataatctacaaaccaaggtctttcatttacagacaataaggattcatctggaaactcatcacgaatttccctctctttgattgttacctcttcattgactaaccgagataagtgatcagccacgagtttcttgcaacccttcttgtctttgatctcaaggtcaaactcttggagcagaagtacccatctaatcaatcttggcttagagtcagctttggtcaacaagtacttgatggttgcatgatctgtaaagatgaagacttttgagctaatcaagtaaggccagaacttcttaaaggcataaaaaattgccagcaactcctcagtggtggcataattgagatgggcatcatttaggactttgcttgcataataaattgaatggaagaccttgtccttccgctaacccaacactggccccacaacataatcactggcatcacacatcaattcaaacccttggctccagttaagtgcaatgatcacaggcgtcgagattagcttttccttcaaagattggaaagctagcatgaattcttcatcaaatttaaacttggcatctttattcaacagattactcaaaggtttaacaatcttagagaaatcctggatgaacctcctatagaattcggtgtgtccaagaaaactcctgatgccttttacactggttggtggaggaagcttcttaatcacatctattttagctttgtccacttcaattcctttgacggaaatcttgtggcccaatacaattccttcttgaaccataaattggcatttttccagttaagcactagattggtttacacacatcgctgcaacagcaactcaagatttgccaaacaatggtcgaatgatgaaccgaagactgagaagtcatccatgaatacatctatgcatttctccacgaggtctgcgaagatggctagcatgcatctctagaatgtagtagaggcattgcataacccaaagggcattcttctataagcaaatacctcgaatggacaagtgaaggttgtttttttcttggtcttttggatcaacaacaatttgattgtagccagaatacccatctaaaaagcaatagaatgcttgaccagagagacgctctaacatttggtccatgaatggcaaagggaagtggttttttcttgtagcatcattaagctttcggtaatcaatacacatcctgcacccggtgatagttcgtgtgtgaatgaggtcattcttctcatttcgaattattgtaactccaccttttttaggtaccacttgcactgggcttacccaaccactgtcagagattgggtagattagccaggcctcaagtaacttcaaaacctcttttctcacttcctccttcatagagggattcaatcgtctctgaggttgcctcaccggcttgaagtcaacctccatcataattctgtgcatccaataggatggacgaatttctttgagattggaaatgttacatcctattgcctccttgtacttcccaagcacatccacaagttgtgcttcttcagatggagatagagcactgctaataaccaccggcttagtctcttgtggctccaagtaaacatacttcaaattaggaggaagcaccttcccaagcacttttgctttctatgctagaatgttttttttagatcttcaaaggcatattccccttgaggaatttcctttgatctatgcaagttgtgatgtcttgttcttcctcatgggaaaggcaatcttccgcatttgtaagggccctttccagcggtgactgctgtgcaaattggtgcactgccaactctgcttcttgttggatgacctctaccttgaaacatgttttgtgatcactgggatgcttcatcacttcaaacaagttaaaagtaactttttgatcttccacactcagttccagatttccatttctcatatccaccacacacttggctgtgagcatgaatggcctatctagaatgagaggtacctcagagtcctcctcaatatccatgatcacgaagtccactgggaacgtaaagtgcttcaccttcaccaatacatcttccactacaccataaggtcacgtgatggatctatctaccagctgcaaggtcatttttgtgggaaagatatctaaattgccaattctccgacatagagataaaggcatcaaatttatgcttgcccccagttcaataagagttttctcaacaaacaccgatccaatagagcatggaatggtcacgatccccgaatccttgacttttacgatagaactctttggataatagcattgcaatttccctccaccacaatgttctcgctattaatatacttgctctttttggtgagcaagtctttcaagaactttgcgtacatgggcatttgttggagagattcaccaaatggaatggtgatatctagctgcttgaagatgtcaagaaatcgggcaaagtagcgctctttatctttctcagaaggcactaaaggatatggaagatctttggcatatatggtcggcattttcttcctagcctcccttgctagctgactcttggtcttagatgatgagaccacaccacctttctccgaacctcccttgttctcatttttttattttctttttctctctcaccgctctctttattgtcatgttctccttcttttctctcaccttcttctccatcactcacatcctccactacaccctccacaagttcagggctctccttcactttactccgggttaccaccttgcactcctccttggggttttgctcagtattggcaacaaaattgccagatgatttctctgccaccttcttagctaactaacccatttgtacttcaagatttttgattacggagtcagtgctcttttgagtatatatcgagacctgcatgaaccgagtaaaggtgtcctcaagcttggagatccgctcatacatattaggaccttggttaagttaagaggcctattcgatgaagctccttggtctttgttgaagttgtttctcggatgatatctccaattttggccttgattatgagagaaattacccctcggatgataaccagagtttcctccttggttgaaacctgaattgccctcttgatgaaagccttgccagttttgattagccatgtaatttacctcatttgaaacctcatcttgagtcatgcaacaacccgactcatgagctcctccacatagtacacaagtgccaactttcaaagtaggaggcgaagttggttgtaccacatgtagttgttgggggagtatgtttaatgtggtagtgaaggtctctatctgcttggctaggagcttattctgagccagcaaagcatcttgtgacgtgagttccatgaggctcttcttggccgacatatatgctctatcacaaaggatggcatgatcactagccgccatattttctataagatccattgcttcatcaggggtcttcaatttaatttttccaccagtggatgcgtctaataattgcttcgaatggggccgcagttcgtctataaagatattgagctggattggctcactaaacccatgggtgggggttctacgaagcatcccacgaaagcgatcaagtgcttcattcagcgattcatccaaaaactggtgaaatgaggaagtctccaccttgcccttggatgtcttggactatggaaaatacttcttcaagaatttatcaaccacctcttcccacgttctgaaactgtttcccttgaatgaatgtagccatctcttggcttctccaaacagggaaaatgaaaacaagttgaggcagatggcattttctagcactccaaaaatcttcattgtattacatatttcaatgtaatttgccaagtgagcataagggccttcatttggcaacccatggaagaggtttccttgtataaggtgtatgagtgagtggggaaatgcaatattagccgcttgaacatctagcctcgcaatacttgtaaagtattatggcgtggcataattggaatagtcttccagtgtaaccctcgagggttgttcattgttatcctccattagaggttcttcgataattggcaaatgagttggagatgatgaaccagaaggatcttccctgtccctttgtctatgttgtcttcttcttgcaccgttgtttctcctacatgtagcttcaatctccaaattcaatgggagaagatcgttcacttgtgctctacctcacatgcaagaatggaaacaactcgaacaacttgaacaaggttaaagaattagtaacataaacaaaataaagataaagaatcaaagaataaagaatgattacttcaaaacatcaatataaaagttccgagtatgaggaacaaagtccctagcaatggcgtcaaaaacatgttaggctaagtacggcaagcgcaccactttgtcaagtaataaagatctagtaagtccaaatgtcgatttccatagggacttcactagtactcaggactaatatacgtttgttttcaagcaatcaatgaatggatttaatttgcaaggggtttgcataaaaataaactatactttaaatgtaaattaagcgtaataatcacaagagaaagagaacaaatgctcggagtaatgtggataaaggaagtatgatatgacaagtgttgggagttcacggaactagaggaatcggatctggttttgattaggatttttcgttgtgtgatgcaatgccgattattagattaatgcttgttgttgtcacaacgtgaaaaactgcgctagttgcttggtttagctgtgtaggttgattttctgagttgttttgtggaagtacatttgttcgaattgctagcaattgacgtattaaatttttattgtttgtctaagattgtataaagatggctgcagaaagatgtggttcatgtgatgtaccatattttctggacagcagttttaatgtaaagaactttttattattggtagttttgagagtttctagaggcaaacaacagaaaaaaggcaaacaacaaaagaacattgttgggtcaatgtacaaaaatatctgaaaaaagattgttttcttttcattcttgtcaatcgtttacagaagattgtcagctagatgtttgctgtatgccactgtaaattccccaaacatgtccctagtgttgccactaactaaacgaaagtatgaattcctttagtgaaatgcagacaagattacagtaaaaaagagagttatggttagtgttagtccataatctaagtgttgtgctgatattctagaccaaaaccaaactgattttctttttttctattattacatttagatatagaactccatgatcaatattatgttgtgtcacgcagatggtttgactgggatcaaaacaagagttctgaaattcataagttgagtctcaagttgtcggagaaagtgctcacacagttggaggatgttggacagcaattagcattggcattcaacaataatggtactgcactagctgctggtggggaggtatagatttcctttgtatttacaattttacaaaggtcaaaagaaaccattttataacattgatgttaatttttagctacattgaaagaaagatgattttcagaaaatatttccctaattaatttattactgcacttccttttcaactgaggaatattttcaaaaagattaatatccaaattccaaactcatgatatatatatatatattctttttgttcttcactttatccaaattaatattaaacagtgaggaatttctattttgttggacagtagtttcacatcatacatatgctttaaattgatattgtaatttttgtgcagtacaggatggcaatctaagggttttcaagtggcctagcatggaaattattctcaacgagactaatgctcattcttctttgaaggacttacatttcaggtttgatgtgcatagcagcttaagcatttaacatatatgttactctttgacttcataattcactgggaaaagaagacagttgacaaaggtgtctctataaaccctgttatatgtgaagggttgtgtcttacagtttggttttgtttgtcttgcatttctgatggtaaattacttgcctctttaggaatgggtggcccctgcaaagtttgggacgtttcttcatcaatggtcttgacttctctatcaaatgaaaatgtgagcaattgattaaaatcttaccagtacagaaagttaacttcacttaaactttgcatgggcttgatagttttatgagctttgtttgaaattttctcttccttcaagataattggtttaaatttgcttattccatggattgtactcaatagtgacataatatacagtgatgatataaaaaatgtatagatcatataattaactagtacaatttacgtatagttttatttagtctagactctagatgaatataatgttcatttgcttactattttcctgtatcaattattttctactgccttacatattttttcatcaatgagtttaagtaggggggaaagacaaaaaacatttatttgagtataacatcagatgttatgtgccactccttatcattaatatatgtcctggtccagtttaagactattttttttttaaatgaaaggtttctttaagaaaattcagattggttcaacatgctgaaccagttgtcagagcagcagtgccaaccaacgcctttgtgctgattttgatatgttctgagcgattatgaataatgttgtttttccttcattagagcaaggtggatgaaatggtggagtgcatctaagtttttgtttgatcacaaaattccgcttaagttaaaagaaaaattctatagaacaattgtaaaacctgcaatgtcatacggagctgaatgtttgggcagcacataggcaacatgagcataaaataggggtagtagaaataaagatgttaaggtggatgtgtggttatacgaagatggataagataagaaatgaagatattcgacccatagttatcaacagtgggcatcgcggccgcgattacagtggagcgcagcggagcggttatgtgcagctaaagtgggtagaggagcggtacgtttaagtgtagcggatgttgcgcccgcgacaggggggtagcagagcgcacgatcgccgtgacgagtccgcgacttcaccgcctaaaacggcaacggaggcaagtcgatctacggcaacaagttcgccgatgagaacttcgtgaagaagcacaccggtcctggcatcctctccatggcgaacgctggtcccggaaccaacggatctcagttcttcatctgcacgacgaagatggggtggctcaacggaaagcacgtcgtgttcggacaggttgtcgagggaattgacgctgtcaaggagatcgagaaggtcgtatccagctcctcttccaccgttgttggtgacgaagtccaagcctccaagggtcacactctgcgactctgcctccgccgtgctcaaccgagaaagagagaaatcgagaaaaagtgagcgaggtctcacgagttgggagagagagagttttttttataaataacattagtgttttttttattgggcccccatattgcttcttgcactccctttattgcttactttactccttctggttcattttttatttaattaaaaactagacttgtgttttaatgccaactaaggataatctattatttgtgtttatgattttccttttattatattttattaatatgaaatacactctatatataaaaacattagaatagctttcatcccgctatccgctatcccactatcccagttttgaaagcggccgctctgctccgctatctgggattgataactatgattcgaccaaaggtagcaatagtatcagtgagtgaaaatatgagggaacatacactactacaaaaaggttattttacgacaggcattttaagtcggttgtcgaggaaccgtcttagaaaggggtgcggtggcatttccgtaattaagatgcaaattttaaagacggttcatagttcaaccgtcttagatggttgaaaacaacgacggttctaaaataaccgtcttcgttttgtgtctaaaatgtggaacataaaattaaaacgacgccgttttgtatgttttggtatttgtctttaggggtccccatgaaattgtgtcgcgccagccctaaactcctccactgaagttcccctctcccactgtcgtccttgcttactttctccacccaagctatctccctaaaccacagtccccgcgtgtttacctccaaacgacaaagcctctcgcctgttgtcaccctcgtgaaagtgcctttgctcagtgtagcttcgagttggtgccgacatcttcaagtggctcaggtatgatcgtttactttcaccaaggttctcctttagttgcagctgcagggtcagggtttaaaccaatagggttaggttttaggtttaatccaacagggttagggttagtgttatggtatatgtaatgagtcatataagtctataaaagttcgacatagttggtgttgatgagtcgagagcaacaaaagcgagggaagcaagagaaaggttctgatggtgctgagaaggtcattgttgccgttaaggcatcaaaggaaattccaaagactgctattgtttggtccctcggtcatgttgttcaacctggggattgcattacactactagtggttgtgccttcacaaagttcaggtaatgccacttttgcctgcatttgatatagttttgcgcttctttttcttgccagatattgtttttctggcaaattggaaaaatgggaatttgattcctttgattcagatgtgagtatctaacatggtcagtgatttttcatgtatatcgtccttttttttatcatataaagggattgtttcatgctttttccttttgaaattttgatggcaatgtggcaggaaatagcaatgagtggttctaaactatgaactttgtcagtgtttgttttgtgggagtttgaaccttcaccatggtattctgtgtaattgactggtattctacttgtatttaggcagaagattatggggttttcctagatttgctggtgattgtgccagtggtattaggaagtaccctccaggaaaaataccagagcagaagagttatatcactaattcttgttctcagatgatccttcagctccataatgtctatgatccaaacaaggttagtacccttgatgtatatgaggttcatgcaaattgaatgttgaggttgtatccttattccaatatttccccaacagataaatgtcaggattaaaattgtttctggatcaccttgtggaacagtggctgtagaagccaaaaaagcacaagccaattgggttgtattagacaagtaatagtctctcagctcttatcttttcctcactgagaggcattctatttgattatatctccatttttggcttattgttttgttgtttacctgagattataattgagtctgtgttgttggcttttggtcttgccctttttgcagacagctcaaacatgaggaaaagcgatgcatggaagaactgcagtgtaacattgtggttatgaagcgctctcaactagcagtcctgagctagggacaccattcactgcaattgaagctggtacttcatcagtttcaagctctgatccaggaacttcaccattcttcatctcagagatgaatggtgagttcaaaaaagaggaaactatcaaggaaggtcaagaactagttgatactaattgagacacagaaagtgaaagtctgtccacatcttcagcaagcatgagataccagccatggatcacagaattgcttttacatcaacaatcatcacagcacaatgaagagagatcagatatatctcatggtatgcctcaagcatctacaaccagagctttcccagaaaagtattctaggcttgatagaggatctggatttcaaatctcaccctatagaaatgacatggatttcagtggaaatttaagagaagcaatagtattatccggaacctagtccccctccattatgttcaatatgtcaacacaaggcacctgtttttggaaagcctccaaggtggttcacctatgcggagttagaacttgctactggtggtttttcacaggccaacttcttggcagaaggagggtttggatctgttcacagaggggtcctaccagaaggacaagtcattgctgtcaagcaacataagttggctagtgctcagggtgatcttgaattttgcacagaggtggaagtcctgagctgtgctcagcaccggaatgttgttatgctcattgggttctgtatagaggataagagaaggctactggtttatgagtacatatgcaatggatcattggattcacatttatatggtgatttctcttgctcccataccaaattatctcatgatagaaatatatttagaattggcctgaacttagtgaagattgtcaagttcataatctgtcaagttcttaagtatatatcatatatctaagtcattaaacaattggaaaatgataatttaaaatcaaattttggtttataaatggatatgccaagtatcataacattttgtctttaaatgatccctttccttttctttcggttgtgcttaggtcgactacaccactgtattgatgtttgttgataacaggcttgctgcaggaatggacttgtaaggcttcacatccatgttttaatataaatattttggttttcttcaatttacattggttgtatgcactaattcaattgaaattagagtatgatggataaggtttggtgtttcaccattctcgtacgttttcaagatgttcaactatagtctataataatactcaatgtaataaaataatgacaccatgacagcatccactatatctcagaattaaaaaacaaatgataccatgacagcatcccctatatctcagaatatttatccaatagcagcactaagtgactcaatgaacctgtgaacaagcaccacttattgaactgcaagaccaaatcaatttatttctggtgataagagattatcacaaaactggattccatttccagccccttaaaaactggatgtactttctgtgaatgatatgtactttctgtgaaaagaagaacctttccaatcttaaactattttgtttttccttttagcaattaaaatcacgacttaccaaactttgagaagtatattatgcaaaagtcaacatgtttcttctatgctttctaggcatatgtgcagatatagcgcaatccaagcatggacattggtcttctctagatcctcttctttttgaacttgtcatctctgctggacagaaggctaaggaggaatcttggaacaaaagcgagtatgagttggtactcagaaaattcatttgaattatatatctttgaaattgtttacaatgacgtctaattaacgagcatggaccaggtgttgatggtccagatagaagcaaacttgtttgtaatttgaatgatgttgctggggaagcaaatattcagtgtaattgttacaggtttgatgggtttgagggaacttgccaacttaaaggttctcctggattttatatgataagagggaaaatattatatatatatatatatatatatatatagggtatattaatgatggtgatagtatgactacgagtatatgacacattctgtcgttgactgatctgcccacatggtataccgaaggataaaagagattttgtgcttcttttcagttatttcatattagcagcatggaagctgtggactttctggatatattcttggccatgaatccttataccaggtactattatcacattcttgtataactagacaaaccagttttgctcaagtacagtgggaaacattagttaattgatttttatatttggtggtaagtaagtatagattttgacatgcacatatgatgatggctggctatatatatgtatatatatatatatatatatatatatatatatatgtgtgtgtgtgtgtgtgtgtgtgtgtatgtatgtgatttatatactattttttaatataaaataattagttggactttgcgaaatgattaggggtgcttgcatatactagcaattaaaattgcttaaaaaacatgaaatataagtaggccaaatcagcaagcattgagcgtgtatttatgatgatggcttgttctgtgtgatcgtatcatgtttatttatttttatcaagtacactcttaatctcacttgagatcaattaattcagcgtgagctaccttcgttgagcacagaacaagtaatgatgttaaaaactagcttcactattattcttttcttccttttccaaaaaatattggtataatcatgaccatgtggcaagtttgagcagtacatgttatttatataattcctacactcataattagctactattgcataagtgtttgtctttgaatttaataaagttatttaataactaatttcaattgtaattctttatttaaaaaattatcatatactgtataataacagaaataaaaattactcgccattagacttactctaagtggcataattttcgtttaataaaatttgaattatttataagtctacattatatttacgatataatatatcatattaacgaataatccttgtcaaaatcagtagttatatcaagtcaagtggatagccgtatttatgctccacccttctaaaagatgtgatcgatcttcagcatctcaagtacttcttggataataaaattaaactttatttatttagaaagaaagtaatttttataacttaagaaatctattactgttagttatataaattcttatgttatgtaattaatctcaacaaaatactaatcttttttttagaggaaacaaaatactaatcaaaattcactttgcacactagtagtgctatcaatgaaaaaagcatttattttaatgtaacaactgcaactttaataaatgaaatgacattattgtagcttcggcatttattcatcctaaaatattgcctttctttttaccaccgtaggcttgctattttagtatcatactttctttacttttaaaagttattttctcttttgtcattatgattataattatttgaaaaacataacattataaatgcaaaaatggtgtaaaaaaaattaagagaatgatatcccaatttaaggtagagaaagtcttcatattcaaacttgtaaattatcttataaaagattctatctttttctacttgattaacttcaattatattttttaaaaaaattaaccatataattttattctatgtattggattttggttgaaaaaagctgaccccttggttattttaactcagtagattcttgcatcttttttatcaatttttattgtggtatatatgtactaatgagtcattttctttgactaaaaaattaaattaattttttattaatttggaatcacctctcactttttccctctcactttttctcatttctctatagtatgatttaattttcatcatattcatatagactttaatatcatcacacgtaaactagaaaaaaagagtagaaaaataaagccaaagtataattacggtaaaaagaaaagtaggttgagggaatacaaaaggggaagttaatttttaattttagttaagaaattagaggaaatatttcgcttaagaccatttttttgttggaacaaaagggaaagttactgttcttagtcctgatgtcttctctatagcattctgataccaatgccaagataaattatctagcaatagggattacatttttgtcttgttttcttgtccagttctgtcaatattcttgttcattatgctcattctctgcaatcacttatgtttgctgcaggctggcaggcccacttctacacaagcagctgctcttacttggataatttgatactgctttgaaaacgacaatttcttagaccagttaagttggaattgggtcacctgccacatgccactcaaataactttccaaagccttgatttgtaagtatggaattgggtccaccaaaggtactcgtacataccacacaaacctttagccttgcatcactcatataactcataaagctcatttgtttgcactgctactttcttttatatattgaaagcagctatgcagttcccgtaaggcatctcaagtagattgtccacagccacaactaattctcttctgaactttgtgcagcaaacgaagttgtcacgaattatgagtttcatggcaccctgcaccatgaaatttggcgctgccactcccacagggtaacactccatcaccctatctatgagtttcatgcgcctctgcatgttcttgctttctttctttgtcgtctatgagattgagatgagaaaggaagattgaaagtggatttgttgtagccttaaaaatggagtcccaaaaacacaagtaggtggttggctgtgtgtttgttgtcctttgtttgatctttgttgttcttgttactgttttacttcatttattttcttttgctactgaattgcaatcaatgatgaggtttatatttaaggattaacgatattcctatttgttatgcttcttccttgttgtatgtcaaacttaaggttcttattcaaagtaaatatgccaaagatgttagttaattaagttaagctatcacggtttgctaattgtatttccttctgctttgaattctatttcatatgccccctccctcctttctctgcttgttagatttgtataacttctttagttgaatgggtcttgaactgaattctagatgcttcttttcattgtggaattttataatcccagccccgtgagtttttaggctataaaggaattatagcagttgatgtgatcaatatcaatccctatctcatactagtatgttgtatcaatattcttattgctattttttatttaataattatggcaggtcaaggattgtagcttaagaacgcatatgttttgactctctcgtgtgccaacttcctgctgcctgacaacacgtgtgtagaactgatcttatttgacatttttgaaacctgtaattgatatctttgtgtcagaatattagaatttacaaaggaaaagaggtgtgtattgttatagatgttatattttatcttatgtatattgttgttagtgaaactctgcatttattcttgttaatgaaataatatttatttttatatacttcgtatggtccagtaatactttaatcatatcatcgcagttactattatttacgcgtaaaaaaaattgaaaaaaaattaaaaaaacccacgaaactacgtcggttgtcaaaagaaccgtcttagaaagacacattctaagacggttattaggctgagaaccgtcttagaatgtgcctttctaagacggttgttacgtagaaatcgtcttagaatgtgtctttctaagacggttattaggctaataatcgtcttagaaaatgacattctaagacggttgtagctaacaactgtcttagaaaatgacattctaagacggttattagataacaacggtcttagaaactcattttctaagacggttgctaaccgactttaaaaatttgtttttttaacgacacctataactacgacggttgtacaaccgacgtaaaaaggggtaaataaccgatgtaaaaagccttttttgtagtagtgatagattgaggtagtttggacatgtaatgagactgtccatggatgttcccataagaacaaaagtttgttaccaaaagctcacataaagagaggtagaggtagaccgaaacttacctgggaaaaagtaattaaacaagacttaatggagtgagatatagattggcggacgatgtgtcttaaaacggaatggagaaaaattataagcttggtggagggttagacccgttgttatctctatgtttcagattgtccctttttagtcattttcctttttatctcccctctccttttcctcttctcttcttttatcttatttttttcttttatcttatttcctcctttccctttttttttctccaacctcctcgtatctatcatttagttcatctaccaccaactccaattagcttgggttaaagttgttgttgatgttgatgttattcaatgacaagaccaatgtatatatatgggtttgattggttgaattgaccaagttcactagcatttttataataggctgggtggatcctaaatcaacctaaaaagaaacaagatgaattagtttcctagtggagaagctaccaaatggaaaaataaagaagggaaacaatagggggctaggataaaatattttaaagccaacagcatagcatatattctacaactaagtataaaatcccaaataatcactattcgtgaaacttttttctctatgtatcataattctacatgtcctgatctagttccagtcatgttgaagtattgggaaatatcatacatttatctgaagtagaagctaattgtaattatgaagacatagccaacatgtagtatcaaaatgttggaaagttgccttaattgtggtcacctctgggttctagccaaccttagttgcagcctctttgtgactgtcttaatcacagcctcaagggtggcgtttagtcccacaacaattagagatatatatggcttaaatagaacttataaagtttggacagttctcaccttacaagttagttttgtgtgggtgtggaaccaaacactaccctcgaggttgcaattaaggcaacctcccaagaggcctcaacttaggtaggttacccttgaggttgcaattagggcaacctcccaagaggccacaactaaggcaggttagggttggctgtgcaatttaagcggggctttataatactccccctcacacccatgactaatgaaatacagataagctttgagaccatcttaggatatggatttagggcataactcaatcccacaaaaccaggttgtaaggtgaggactgtccaatctttataaactctatttaagccatatctctagtcgatgtgggaacaaaacaccaccctagaggctatagttaaggcagtccctttggggactgcaattaaggcaggcttaggggtgactggaattaaagcagctttccaacacctaggttgaacatggaatgatatgcagtgcctcaatatcattcacatgtttgatttggtgattggtttgccagtaattgtgtaatctaatcatattttgttgaatttatacagcgtgaaacttttagctcttgcagattttctcaaataaatgacgagactcagttcctatatattgctgccaagactggtaaataattttgcagagaaaaatgatctcctttttgtgtctttcaactgacaagtttctattgttgtatatagataaagatactggaagcatcctgacctggaatacacaaacatgggaaaggatggcctcaaaccatattattcgtgatccaatctctgcattcaatgtctcagctgatggaaagtttcttgcatggtacatattctaatctgtatttttctactacttaagatgtcatccttgtcttttcttaagctacctagaagcaaatagtgacttaatttttgtggtttacttcagacctcaagggtgcactttgacaagaacttatttcttctgttttggtggattgacatgcagtggaacaccttcaggagacattgtaattgtaaattcaacaaatatgcagattcacacaattataaaaaaggctcaccttggcgtagtaactgctttatcattctcccctgattcaaggtttgaactcaatgtatatatttttcatgtgtctcatgtcatgtttaaaggtagtcactgttgaagtggcttctgcatttagggcattggcttctgtatcgatggattcaactgcgagggtaacaataattgaagagaagaagacaaatggtacgtgcatatttcatagtttgttgacaggttaactctaactgtacagatacataattgtttggcagaactctttttacttagtgtagtccgttcagcctatcccatctgtaacttaattaacctggaatattagcagcccaaaattttgttgaaataacatttcaaaaaagttagaaagtttagcacgctgcctgtgaagaatatctggttcctgaaagtgaaaatttatataattatttttttgcatgggtacaatgatgtactgtcaaaaataacactcagtattagactgttaggtactgaagcatgcctgtctttgaacatgtgaccagcgtaaaagtttttaactcctacatgtgaaattgggccataatgccatattagcataaagtgggaaaataagtaaatccaacataaatattattgtgtggttgattgaatattcatcattcaagttccgtatgccccttgccatgcttcagttgtttgtatactgacatttctgttcaaatagataatagatctattcacaaagattaaacataaaaaaaattgcctggatttgggcaaagggtcgagtgtaacaacttccaaatttgaccaaccccatcacgccaaaaccaatatataaaataatatgctacaaacgaactttagatacttacagttcaataaaatacacaattttctttgctaaatggatgatgtatttgatcatgtatcaagtnnnnnnnnnnnnnnnnnnnnnnnnnnnnnnnnnnnnnnnnnnnnnnnnnnnnnnnnnnnnnnnnnnnnnnnnnnnnnnnnnnnnnnnnnnnnnnnnnnnnnnnnnnnnnnnnnnnnnnnnnnnnnnnnnnntatcatgctacttgcagtagctgcttactttgtgaagcaagaaattgaaaaatgaaggttccaagattttgctacttattaaatatgaaaattttagcatctttgtgaatgcaactgcttagttttgatgctttgtcattttttgaggggtttgctgatacttttatatattttggcatcttagtgaacagttgttctaggacacgagcctctctaaaatgccttgtaacatgggttgtatcgtacaatgcttccaggtagaattgagttatcattcattacttgcttgatatttgctctgtcttgatgttataaggttgtaaacatttgctacaaaggatagtgcatttactgaaccaaactttgacaaatgattcaacccataatgaagacttaatgaatcatgactgaggttttactacaactaatatcaatgaaaacaaattatttcttaattaatattttattatgttcttgatgagaaattattttcctgtattctttattatcgtgttcaaaaatttacatattaaaatgatgacgatgattttttttttttggggaaggcaaaatggtgacgatgatttttttttttggggaaggcaaaatggtgacgatgatatcattttcataactagtaatttaatcaaagttcacatatacgatatccacaattccttaaagaatgcagaatatctctaggtttaaaattttgtgtctattccttgacgtaatgtcccagacttcgcaaatttagaatcacatatagcaagcattaagaacacaatcaagaataatactcctcctggtttttatataagaaaaaatgagtgcatttttttttctaattataagaaagataaatctatttttatatgtattaaacnnnnnnnnnnnnnnnnnnnnnnnnnnnnnnnnnnnnnnnnnnnnnnnnntttttcatcaaaaaattaaactattaattgttacttttttaattttctttattcattctaacatcaaggttatttttatgcaagtactgtcattaaataaaattcacttatatttggattcattggcctattaataatataaattagttacagtggtgggaaaaattgtcctttcaattacnnnnnnnnnnnnnnnnnnnnnnnnnnnnnnnnnnnnnnnnnnnnnnnnnnnnnnnnnnnnnnnnnnnnnnnnnnnnnnnnnnnnnnnnnnnnnnnnnnnnnnnnnnnnnnnnnnnnnnnnnnnnnnnnnnnnnnnnnnnnnnnnnnnnnnnnnnnnnnnnnnnnnnnnnnnnnnnnnnnnnnnnnnatcaattccaataaatttcacttcataaccaatagaaaattgaattgaaactttagaaaatgcgtgatatacaatctttgtttgctattagagggacaatagtggtaagaataaaaaaaacaaggcaaatcgtgttgaaaaattcaaatttagaaattgatgtagttttttttagaggaaggatattgatgttacatataaaaaaatataaaaaagagaaggataagtcataaatttgattgttacaagttgtcttgacaaaattatattaaattatttatccaagaaccaatgaaagctctcacgaagaaagaaagctcatatttcattcaaactcaatctaccttaaagctataggctaagatttcttctaaacatcccactaagaattaattcttactaagaattaaattttcactagaattagaactccattaaccaccataatggtttaagaagcctgaaaaacataaaaacttacccaaaatatatcaatagtcagtatgaaattattagatgataaataaatacaaaaatnnnnnnnnnngtcgtatgaaattattagataataaataaatacaaaaattcataggaaaattagaaaatggaccttaattagtgttttagtccaaaagttatataattcatctaaacaaacttcaattcataattgtgtctttgaatataaactcttagacttattgtgttcttacaaattgaacacgtacatctataagctttgaaaagtttttcgattcttttttatcttactttagtcattagatctttcatctattataaaagttactaagtaattggatctttggtggataatatcaaatatcaaatagtaaacaaaccgttcaattgttatcgcctttttctaccgaactaacattcaccggtaggaggaaaaagtatccttcatccaaacttgtataggtgctaggtgaaatttgtgtcaacaaaaaattaaaaaaacaaaacaagcttagacgtagccttcaattacgctacacttagcatgcgtatgctcaatcttaagagtaaaattgtcttaatgtactcactgtatagttcctcaaacttgtacaagattttccgttttatgcacgtcgttactttttaatatatatatacgcacacttgtgtgtttcaaaatatattaaaatataaaatatttgattacctttttattgatatttaattttgataaaatttgacacaaacaatcttgataatatatagatataattcaatggttagatcaataaaaatcacattttacataaaattataaaaatgatgtaattatcaaaattacaccaatataatttgatttctcctttatatatataatgaaaatgcatataaaagtaagaataattgaaaaattaaatcttatcaatgtgattcagcaaaaaaaaaataatcttattcgtgtgaattatttaaaaaaaatcacatgactttcttaattgatcatatatttttttaagaaaaattgtaatcttgaccaattacaattcatgttctacagtacagcccagattcctcctctcaatatttttttagcaaacattgaaccttggaacaggctactagcttgtggacttgtggtcattacgtctataggtgtgttgagtcacaatactttcattatttacaaattccatagcggggaagtggcggtggctgcatatctcatactcgttttggtcaccaaattatgtacgtgtggattaatccacaattaacctttgaaatgatgaaccgcaaatataatggaacctacactcgagggattagttgctgtagatagtttatgaatgaacttgccatttaaaaaattgggatcggtatacgaaggtaactaaaccagaacggcaatacatgatcctgaaaatttccaaagatcattattggcgcttcctttgatacagtgaataaccaacaagtgtctcatcagaaatgtccatagaacctgcccacagcatcaaaataattaaaacaagataattgcagagaattcatagagaaaaaaaatcagcatgcactttggaatagggatttgggagtaccgtatttatcgctagccacctttcaagccttctaatctttgattgcatttcctcaataactccttcaattagagagactaccctacttgatgaggattctgaagctatgaagcacgacttgcaaaaaaaaaaaaaagataattcaacatatcggacacacgttcaatacaaatacgtcctaatatgcgattttacgtatccaatttaaagggcattttatttttacaaaaatgccctaaatataagaaagtatgttctttctcccgcgctcacctcacctcttcgacttcgacttcgacaacggcacaacgcaagaaagtgccatagcagtgttctttctccattgtcattcgccgtcgtttttgctcctcctccaccgtcgttcgccgtcagccgtcactgggaaacccccaaagtcggtgacaaagtccaaggttcacgctcgacaaggattctcgccagtgggagaattgcgggaccaagctttgaagcatgattggtgcagggggagagagagagagaatcgaaagctttggaggaaagttttggggaaaaagtggtaaaaccaagagggaggtaaagggtgtgtaaacaaaataaagaatgctatttacactctctattttcataactacacatcgctatttacaccattccatttttcatgtatgcacccttaattagtttgggtgttattaaaatgaaatacactctatataaaaaaaaattatttaatactaagacatatcggaaacgcatcgaaatattaatatttttgaagtaacgtatcgaagtcccatatcgagaacgtatcgaaaatcccgtatcgatatcgatgcttcttagttctgaagcatagctacatgtttcaacataataccgctaaatgataatccctaaaaaggatattgcatactttaaaaatgtgaaaaaggttcagtacattcaataatgtagtagcttgggatcaatggagtcgccgggtgctgtgaaggtgtgcatagctttagcatgacttggatgtgtcgaataaaaaggggcagatagatacctaggtgccactagtttaggataaatcgggtcaagtgaagaggctgcactaccctttacttacaaagttgcattatataggtaaatatttcatgcatcaaaatgtcaagcattcattttttaaaataggctgtactaccctttctgatgttactttttattacaaggtaaagatttcatgcatcaaaatatcaagcatccactttttttttcaaacatgcgcacacacacccccacacattatcctaggtaaaatcctacacacacccacacattatcctaggtaaaatcctaagttcgtcaaagatatatgcatccaacaactagcatatatcaaaattcgcaccgttctttttctaccatttgatatttaactctgaatttcatgagtggagactatttcctaagatactattaagtgcaacttcttaagcactaatgacaaaaaatgcattttatcatgtcatacatgaacacattcctatgtgcattaaatattatttccaaaatacccaccgaagagaaaagaagcgcaagccaaacccccctccttgggtgcttccctgtgggttttccatcagggtggggttcgtgcatttttttctggtgcgttttctttcctttgtgcttctcccgtgtatgagcttcttcatttacggtctcggttgtggagttagtggagtgggcggtggcactttgtatagcatcttgacgagtggaagggctgtggctgtgtcggtgactcctcttcacaaaggctcttgtggtcccattcattttctctttgttttcgaaggagttctttgtggaaagaacagacacataacggctccgtgcttctagggctcacgacatgtagcggcgacaatcccttttgcagtggcggcggcttacttcctctttgtcttccgcttcctggtctgtttcttcattgtggtctcttcttcttctccaagaacagttcctgttcttgatcttgtttttgggtgggggaggggcagaaccttttgaggtcgatccatgtcaattggctggtgacatggggaagaccaaaaagaaaggtgcaggtgtgaaggttgatgcttctgcttctcgtgcacagaaggtgttcgacgcagtatctgtatcgagttcacatgatactattgagcctccaagtccggtagcactctaggtgctcgaggatatgcctgagagaatagttgaaggtagcatggttggtaatgctctccagaagaaggatgagctccaagtgtttgatagattgccagaaagaaagacgacggacaatcctccttcgagtaggtctgttaccttgggtaatgaggacactaacacggttacggttgaggattgtgactcatcggttggttgtgatgaagacagtcctgctctggatgactttgaaccacaacagattactccccctagacctgcctggacaagtctgtttgctaatagtagagacccatcacagggtctggaattatcgcccaaacctgagtgtgtggaacagagcttccatatctcctatgaggattgtgctcctttccagcaggcttgcggattcagtgctattggctatattgcggggcggtttcctggcaaaaaggcgttgatggaagaatgcaaaaaatggggagtaccgttccagtattctgttcacccatcgaggtggcttattttcaaatttgagaataaggatagccttgaaaaagtgttatatggagggccttacttcatctaccaaaggcctttgctgttgaagaaaatgccggagttctttgcttttggaaatgaggagattacccgtgttcctgtttgggtaaagcttcataatcttcctctccaattatggacgcagagtgccttgagcaaaattttgtccccggttggtacccccattagaacagacaagttacaactgaatttggctcttatgcctatgctcgggtgttggtggaggtagatgtgtcgaaggagttggtgaataaagtgaagttctttctcccggatggatctcccttcgcgcagaccattgactatgaaacaaagccaagattttgcaagggatgcaatatgattgggcactcgactagtagttgtagaattcaatccactaaggcccgtgatgattctgagaagaacagggctggtgaagagaggggccatcaccaaggtcaggaaaatgatgccaaaactgtggaagatgaatctcaggaagttgaccatcttattggtgaggctgacaaagctaagcagccttagatcaattatgaggccattaacttgggggaagtgaacagtgagggtccagttgacgatattcctgacaaaactgatgaaggaccatctgagcaaattgtgaataattttgaagtagatgaagagggcttcatgaagaagaaaacaaaagtgaagaaaaaagctccaaagatctctgtggagcttaaggtacaggggaaagccttgaagaagaattcaaaacagattaagagaccaaatcatttttttgctggggagcctacttcccacaaaatcccatgattatctcttcatggaatatcaggggcttcaacatgcccctaaagcaccatgttgtgcttaaatttgtccgctcaaaggaggtagatgttgtagccctcctggaaacaaagattgatagtttgtttttgaagagtaacctattgaagaagttcggtgggtgggattgtgctaataattttaacaaccatagggctggtcgtattctcattttctggaggaaggatagagtcaatgtggatattttagatatgacctcccaagtcattcattgtcaccttcgcagtaaaatttctggtgctagtacttgggcatcctttgcttatgggctacattctataattgaccgtagacagttgtggagctctttgctggactttgaggcttaggtgaatggtccctgggtggtccttggcgactttaatagtgtgttaagcccgcgggatagattgaacggttcaaatgtttctgattatgagatgggggacttcagtacttgctgctctgatttgggtcttcagcaattgaataccactggcccgttctatacttggactaatggtaatacctggagcaagattgatagggtcatctgtaactcttcttggatggcttctttttgccattcctttgttgttgtctcggaaatcagttctatttcagaccatgcatctctgattgttcatttagaccctactcttgagaaaggcaaaccagcttttaagttcctataatgcaatagctgacaactctaacttcattcccacggtgaattcagtttgggatctagaagtgagtggttgcaagatgtttcaagtgtgcaagaagcttaaaatgcttaagccacttcttaagaatatttatagagcggattatagtggtctagctgggcgtatagagcaggaagaaaaggactattacaatttgcttatccgtatccagcagaatcccaatgactatggccttatggttcaagcagctaatgatagatctagcttaatggctctccgcttggcagaatcccgtatgctagcccagttatctaagaacaagtatttggtggaagctgataaaaactccagatttttctactctcttgttaatagagaaagaaatgctagattcatcccggcaattcagagagataatggtatccagactacttcacaagctgaaattggatcagaatttgttaaattttttcctccttgcttggctcttcttcagctacagagtccccttccttagaagtttgttctaatggttccaaggtgccccctgcctgctttgaggagttgctcaagccggtctctggtgaggaggtttggagcattatctctagaatggacaacaacaagtcccctagcccagacgggtataatgctctcttcttcaagaaagcttggcccgttatagggagagatgttgttgaagcaactaaggagttttttgagaatgggaggcttcttaggcaggtcaaccatgccttcattgctcttattcccaaaagagacaatgccaacagagtcaatgatttaagaccaatcttctgttgtaacatcttatataagattatagttaagatcttggctgataggttggcgccggttctgtcccatattattgaccagctcaagcgacttttgttaagtccaggagtatggcaaacaatgtttttttggtccaagagttggtcagaaagtatgctaggaaaagaaactcgcctagatgcatgctcaatatcgatttacacaaggcctatgactccatatcttggaattttctcagatggatgttgtagaccttgggcttcccggctaagttttctgagtggatcatggagtgtgttacatcaacctcctttagtatttcagtcaatggagctacttatggccatttcagtggcagcagaggcttgaggcaaggggatccgctttccccctatctgttcgtgttatgtatggattacctctctagagacctcaatgctttgaaagacaatatgctgtttaattttcatccaggttgtgcccccctgaatatcacccaccttgcgttcgctgatgatattgtcttattctctagaggtgacatttcttcggttgctaccatattcagaaagctaggccagttctgcaaggtgtcgggtttagtaatcagtcaagagaaatctgttttttttttttcgtctggtgtggatgaggtaacttgcactgacatcatggccttgacagggttccagctgggctctttccccataaggtttttgtgtatttcccttatggcttcaaggcttaatatttgtcactattctcctctgctggatcggattggagggcttgtgcagaactggcataggaagttcttctcttatgttggtcgcctggaattgatcaaagtcgtcattggtggtttggttaatttctggatgggtttatttccgctgcctatttctgttctggacagaattgatgcgtactgcaaaaacttcctttgggggaaggccgagcctagcagaaagaaacctcttgtagcttggaagctggtctgtgctcctaaggaggagggagggatagggctgcatgagattaggagttggaacctttctcttctgtctcggtctctttgggatatctctaacagcaaagagtccctttgggtgaagtgggtccatcactcttacctcagaggttcctcggcctggcagtaccattgttccaatttggattctgccctcatcaaaaggttgttttctattcgggatgatatgattagcaaggaaggtaaccgggattaggtggggtcggtgctgaattcctggatgcaggctggtcgttttaatgcttgtttagcttatgagtatttccgtgttgccaaccccaggcagttttggtacaaggctgtttggaattcaggtacacctcctaaagaagcattttgcctctggctggctgcccacaagaagtgctttacccttgaccatgcgccttttttagacaagggagtcacctgcagattctgcaattctgaagccgagtctaatgaccacttgttcttcaagtgccgggttatcttaagggtgtgggctgagattagggattggatgggttttccaaggagaaacatttccttacagggtaccttaaacagtctagtgcatggtcgggctacttcaggcaaagtgggaaagctttgatgtctgactttcgctaccatggtgttttgtgtttggtcttgtagaaattgtatgcttttttagaatcatagatttaaacattctgatttagttgatagaattaagtttagaattattagatatgctcatttaacgcacttgtattagcaaatgtgtgctttttgttttccggagtttattgtccggtatccgcatttgtcccttttggcaagtgtagttgttttcttattttgtttttcccagggtatgccctgtgtattttgtaagtatcttttggaaatatatataatttacattttttccaaaatatatatatatatatatatatatatattatttacaacagtcttttgtgccaaatgcagtctggtgtcaccagtctttgtcctaaatgtgctatgttcccatcagtcttagtcctagacgtggtctggccctgtcaatgtccaatctcatcccacaagctgcatctgtgaagtcctaaatacaatgtggccatgtttgtgcttcactcgtctacattctagatgtgatctggatctctctatcccaaatgcaatctagtcctatctatcccaaatgcaatttgggacccatcttatcccatattttgctacatgtttttgggtatcctaagtatcttgtattccaattgaagattccaaatgctattcacaaaatcgacttataagatgaggggttaaccacaccgcttcacaccaaacacaacgaaggtgtgtcaaagctgccataattaaggcatgctaaggacgaccacagttaaaacagctttgcaacagttatttttgacaaactagggaaaattttaattttttctcatgtataattgcttggcaggaatttccaccaatgagcattccagcaaaatctctttcttggtcatgtaagattcaaactaactcatttattttctgatcattctagccattattagtttttttccaatcaaagctgcaataatctaacaataatccgacatctctagcatccctaagttgccttttcagtttccagccatgttttgtgggagttcattaataacaagcttcaagcttaggaaggttatgctagagggaatgttagaatatctagaggatatctcataatacacaacatcatcaacagcatctttaacccaaatgttagaatatctagaggatatctcataatacacaacaacatcaacatcaacatcaacagtacctttaacccaagttaattggagtcggtggtagatgaatccaatgataaatcgaaaatgagacaaagaaaaagaaagagagaggggaagaaaaaagtgaaaataagacaaaagagaaaaaaaaaaagctaaaataaaaataatgatgaaaggaagaagagagaaaagaagagaaaaagaactaaaacaaggggatgactgaaatataaaactattaatgtgtttaaccctccacccaacttataacttttctcataatatcatatgattatattttggagtatcttagatgatctcttaggaatagtttccatatttctttatatttcatgatttgtttcattcttaaatctataataagtataaataagagttagtacttagtagtttatcttttgcatcatatcagaatacacgagaatattattcacaatttctttccctactcctttacctatatacctataatttcaacaaagttaaataaattaaatggctagtagttgatgaagccataaataaaatagactaaaatttgtccagtgagtaaaggctacctgagattgaataaattcaacaatctctagcagccttgctgattgctgagaatgaatcacaccagaattctttctattgccggtagtctttccaaaattatttcaagataactctacaaaacaaaaaacatgaacagttgttaaggtaaccaccacctagacatccatgaaataattatttgatccagaacctgtaatacgcaccagagacaaaaggtgaagtacaataaagcaagaaaatcaataccttagtagtatattaaccatccaatttaagcattgaacctgctgctgccactgcatctttattagcaccctttatctgaatgtatgggccagggacatcttgtagatgatcaacctcaattagaatctatcccagaaaaaaaatgaaaattttaatgcaagttaaaagcaaccataaataacttattccaatatgaatatgcaacaaattttagtgtggcaaaaagaagtaaaagaactcatacataaacatagctaaccagaaagttattttttgtggttgcaaatgagctatctgctatcatgctcatctattaaacgattttatgccttgtatatattagccagacccatttgggatgcatagtataaactaagcacatttgggaatttttacgttaaaatccacaagttcttaccatcaagtagtgagatcaaggtgaatatatcatttttttataattatgctaaaatcataatattgtatttctactaagtaattaggaaaccccaaagtaattagttatttgtacacacacaccaaaactgaagggaataaaggccattgttcagtcatgacatttatataaatagaggtctaacttctataacaattctgaagtaattagggacatccctctgaatcttgcatctctccattgtcttcattttccttcttaaaactgttgtttttcaacgataaagttttacattaaaacccagttatattataaaataatgatgttaaaatagactattataaatctgatctcaagttctagtaaacacaatccattataaaattcagttggtgttaaaataatttgaatccccatagtgcaaagatcagccaagtttgggagaaaaggaaatcaggaacaagttcatctctgccttgtaaattttatcaactaattaatggaaacatgtattatcagtcaaatgtaagtcataagataaaccatgtgacctttccatcctgatagatgaatgcagacgcttcaatataagcaacagcttggtacctgacagaaagtgctaccaatcaataaatcaatgatgactcataaatacactaactggcaaaaataaacaaaaaagggagtgatagtgaaaaatgtttttcaagaattgtgtgctaccacacatctaatcatatctatatacaagatagcacatgagtgcagtagttataactgtttataggcactatttcctatatgctacggattacaatatctagtaatgtgaagaaatactacaatgtacagtgaagcatttgcttaatcctagcactctccctcaaggtggagcatatatatcatgcataaagcctattacaaataaagtcgacttgagttcctctgagggatttagtaaatgtttgccaactgatagtcagagttgacaaagccaaacctattttgcctgaaagaacattttctttattctttaataaaatgatagtcagtctctatagtttggtcctttcatgaaaaatatgctggaagcaagatgaaaagtagcatgattgtcacacattaatgtcatgtttggtccttcaaaactaatagcataaaagcagagtggatcacaacaaacaccagacccgtagcaggacaagaataatatattggatagtatttagaatgtaaaagaaaataaagaaccagcctctagaagaatagagatatcattgactgttggggttttctcctcctttactgttgcatcgaattttttttccttctgcctatttaagtttgatagcagcatagggaattttatcttcaatcaatgcttgaaacatagacaagtgactaacatcgatgataatcaattacttcatttaatatagaaatatagaatccggacaacatccataagaattcagaaattctagtagcacacaattctcacactattaataaacatcaaaacttaatcaatcaaacatagtcgtacatttactgaagatttataaatgggtaagaatatctttttgcattgaattatggcttacccaagattgagaagaccagcaaccgtactaatgctaatatcaaaatccactttaggctgaatgatgaagttcccttctttgataggctgacacatgtacaagataacaagaaaattttcaaataaaatagatcaccaaaatggcacagtaactatacattgacatttctaattgtgttaaggtatcaaccagcaaataatgggaagataaaaatatttccaacctctcgtatcagcaatgcaaatctgccttcacatattctgactcgaatacaatcactatctctcaacttcccattagaagggatcccaggaagccttatataaatatcaataaatttctgctctgaactgcaaaattttgctgaatcaagaattgcaacaatatcttgatatgctacctgttatttatttctatcttcagtaaacatgttgaacaaaaccttgtcacataatatatatagatagataaataccataaaactttacttttttgttactctttaatacaaataatgaactctcaggagaaagcacagggtcaaagtcatttcgaatttttaagctgcaagtcaacattaaatgatgatgtgtcatatgcatcaattctccaaaagcaacaatttattatccaaaataaaaagaaaactgaaacaataatgcaacaacatggtgacaggtgggagcagcaaatagaaagggcggactataaatatcaaccaaaataatcaagttttatattgttattacttattacagtgtccgtaatcataggtgaagctgaagtatttctcaagattaacagaataacatattattgtaaagtaggcatagttagagagcattataaaaggtaaggaagtatagttctttacatggatcgttaatggttcaactgacaaatctaaaatcatcaagctttaaccattaactcctaagcagttttaaaatatagagggaaaagcatactatccactaacatgtgcatgaacaagatgaggttcaataagctgctggaacataggaaacactgtcatcatgatctcattttaggaaataaaacatgtcactctactcttatccctttgaactcatgaaatcaaatgtgaatgaacacctccaacctgtttcagataagaaaatcaaagtgagaggcttcctagccccaacaataataaaaaaaaaatagatgaaacagaaaatggccttcgaagatggagactcattcttacaacagcaatccacaagtcaagtgatattcgaatatcaggatgcagagcatagacgccttcaaatataatctggtcaaaattaacagatagactctgaagaaccacattgaagaaatgcaataaagaactagcattacatgactagaaaactatatcaggaattctgcagacaaaatatataaagaatgtcaagttatcatgcatatatgtacttcaattttttggtatccttgatttgtgagaaaacaggaaacaagtaaaaagtggatagagacaacttcttagatgggaagtgtaaatagtacagttcaattttgggacaaatcaattgctatatcccaaacccagtgtgacgtgggatttcaaggatgcgacaatcacaccatacagcagtttgtatctcagtgtatcaatgactccctttaccagatcaatactgatttgattcttaggaagcacttttagcatagcatcatagcctgcaagctatgaagggttaagctctaaaaccatttggaaactataagtgttatttactgtaatgttgtgtgtcaaagatgaccacactaaaaatcctttatttataatgagcaattaggatctacattaattacatagaatcaatctaatctgagtgataatgaacaaatccctaatttctctctaatcataattaacagaataatatgtaatcttaacacttcccctcaaacacgagcatatatgtcatatgaaccgaacttgttacaaatgtgatcaacccgatagaaactaaatgtggttcgagtcatgtggttgcgtcggataacatcgctcagcggtagccaacaaaggcccgcaatgatgatggagaccactgtgacactcactggagatgcgttgtgtgccgtgtgcgtgaacttcacgtcatgcatcagggccctgtgtgaggtcacatgcaatggtgttttgagttggctgcgcacgtgaacgtggcggttttcgccgatgacatgtactgttcacccataaatataaaaataaaaataaaaaagcaaaatggtccactagggacgtcttgagacagagggagagaagaccagggtgacacttataataacctggtttctaaaaaaaaacaaaaaaaaaatttaaataaataaaataataatattttactgtagctgtactgtagcatggcgctgatagcgtgggaacggcgcggttagcgtgggatgcgacgccagtagcgtgggatgtggcgccagtagcgtgaaattgcaccagaaggccatttcttgctgcctgatggctcggatagcgccagtttggcgtgattagcgccacagacgcgcccagttcgcgcggttagcgccgtagtggcgcgattagtgccataagtgcccaggaagcttttagttgcgctaatttgacgcgaatagcgccatatatggctcgattagcgtgggaacgtcggcagaaccaatatttaaaggccatttacgaaattttggcccagaaatcatggtttctccttccccacgaccccaacctccattgatgcatgctccacgcttccttagaccccttttcttggcctaaacacctctctaagacctttgagtgtgagaggaacctttgggaaagcttgaatccttcaattctgctcttgaaaaatcccttttatgtgagaagtggaacttcaaaggaaaagctcagagaacttgagtttggcgaggacccacggcgtgattaggacacagaagctcgaggaagctgtcctgaggtcttttgagtcgccactaaggtaagagactcaagtttctccgtttaattttgattttgggggattccatgaatagtgactcatatgagctggggctagaattagcccaggatcctataaagaaacttactcagggcaatgtaatgatgaaggattagctttcagtttttggtttagatgactttggattttggctctgtgttgcctgtgtggcctgtgttatggtcacttgtgattgtctgttgacatgccagagccttagttagattatgttgagcctgagaggctaggaaatgagactttgaatggaactcagtccattctgattataattgagtttaaggctgagaaaaactaggccttttgtatgtatgctctgagtctgggatgactcagatggcttgtatgcagcctgatggaccttgaatggtctgagagtagtctggtgtaggctgagcttgcttgaaccctaggataggggaattctgtatatgatatgttttgtgtttaaatgtctgtagattggttttgatattagaatatgccttgattagggcgtgagattgagactgttggtggcgggagccacagacctgggaaggaactgcagactgaaaccttaccaggtaagttcagtgtccctggggatgaattcccgcatggttgcacaccacactccgggggagtgatggtcatgattcatgatgcatgcatttggctgttgcattacttaaattgatatgcatgtacttgagattgattatgctattatttgggcgttgagggttctccgccatatgttctgggcattgagggttctctgccctgtgacttaagcgttgagggttctccgctaggcattgagggttctctgccatgtgatttaggcgttgatgagatccgccatgtttgtatgatggatatgttgctatgaggtccagtgggccatttggtgtgtgattgccttgtgtgtgcattgtggatagtgggccagggtgggaaggattttccatggaccctgagcttactgagatgtgtatctcaccccgtgtggggatttatgatttcaggtgactcttctggacgaagagagcagtctcagggcaggaggcccgagtagagacgcttctgcttgactgagaagcagcaaatggagcttgaaggctcagatttgttttgattatattttgtacccttgagaagggttgtatagttctgtagaccctcgagaagggatgatattcttttgtatcaccagtttatggtgaaaccactgatgtatatgtttatgtacagaactatttgaggttatgacatgagactttcccctgagtatatttgtgtatatttgataatctgcctaagtcttttagctgtctgtcttcatgatgtatgatatgagaactggatcagcatgggtgtgaaatatatgctttgtatgtatgcattctatgagatatgagtatttcatacataatgaatcaagaaaacgattctgtgcttccgctgaggttttaaaaatcatattttaagcgttaaactgatattattaatgataacacgtcggagacctacagagtattacaacactgaccaaagatgcatcacgcgtcatgtgcgtgaacttcatgcactagaaaagggccatgcatgggtttgcatgcgacagtgttttgagttggtttcacgtgtgaactgcatggcagtcttcagaaaggtcaccagaaaatggtcacccactatattatccatgcacgtagtccaaaagttttgctgggcatggggggtgtattggaaaaactcaagtccacatcgactagagataagaccaagataaaatatataagtggagtcaaccctcaccctatgatctagcttttgggattgagttagacctaaacccacattcttagagaaactcctgagcagctattggcatggtaacttcaaagatataagcaggtcaaacaaacatggtatactatcaaacaaatgttagagctaaggacctaagacaattccaaggcctacacctaatagcttaatcttttggaaaagttgtccactaacatgatatcaaacttctctgacaaagttatccggagttcaattcttccttcgctttcttctagttaaaatataatatcagcaaaaggtgctgaattcaaaatctactaagatatgtgctcatggggtttgtaaaaatacaatgcaatgaagataatatctttacaacttcaggctattctattaaatctcacaagcaaagttataatggaggaaacaaatttcaggcattgggggaactagtttaataactgagcactccacaatcttcagaaacttcaagttccttgaagccactccgagcaccactttccaagtcaaatataggtacttttgttctttgaccatttcttatgtcatcaatattctgcaagggactcaagaataagactgttaaataatccattcgtaacatggctgaaaatatccaaaagctttgactaaccaagcatttaaagcaaagagatattacaatcttccttttttttggtaaatagagataataccatcatcttataaagataaaagttttttggtcatttctaaaaatggattgtaggttgatcttcattctaaaattatcatcttccataatattttttccatctcaacatataatagttgtactaagttgttttacaaaaaataaaaaatagataaaaaaagaataataattttataaaattaaccttatatcatcgttaacttatttatcgattttgaaataattaaaataacagaattgattatgatttgaatatatatatatatatatatatatatatatatatnnnnnnnnnnnnnnnnnnnnnnnnnnnnnnnnnnnnnnnnnnnnnnnnnnnnnnnnnnnnnnnnnnnnnnnnnnnnnnnnnnnnnnnnnnnnnnnnnnnnnnnnnnnnnnnnnnnnnnnnnnnnnnnnnnnnnnnnnnnnnnnnnnnnnnnnnnnnnnnnnnnnnnnnnnnnnnnnnnnnnnnnnnnnnnnnnnnnnnnnnnnnnnnnnnnnnnnnnnnnnnnnnnnnnnnnnnnnnnnnnnnnnnnnnnnnnnnnnnnnnnnnnnnnnnnnnnnnnnnnnnnnnnnnnnnnnnnnnnnnnnnnnnnnnnnnnnnnnnnnnngaattgtttttacagcaaaaagatagaaagatagtttgcaataaataaattgggcagacacaattatgattaatgtatgattcaccaacaatttatgtaagagacatttgttaaaatgtcttatctactattaaaacatacatacattttttaaaaatcaaaatatacattaattttttatcctcatttaaaaataaaaaaattataaaatatgtatgtagaaaatgatgatgtaaaatatatataaatgagataaaattatttgataaatttaatattcacaattttaatatatttttagaaatattcaaaattattttcaaagatatacttgtaaaatttaaaaaaaattataataatataaattttatttatttttacatttgtaaattaacacccttgcatgtcacatgttattgcactagttctaaaaatatcatcatccagaatacttttttcatttaaaaataatagtcataagttgttttatttaaataaataaataaataacaatgtgataattttacaaaattcattttatatcatcattaatttatttataaattttcttattcaccattaatattataagaaataaaaataaaaataaatgatactatataattttaagataattttttatctagtacaaataaaataagataatacttacacatttcctcaatatcattgatcacaaaacaccaacttgccacctttgtaacacaacccttgttccccaacagaatccaccaccttcccatagctatacctcaaaggcattctctccaacaccctatgaaactcccttatgcaccaccctctcctattcctatgctcccctttcctactactcaaccccaccacactcaccccttcttcttcactctcctcttcatttctggcatcaccataatcccttactctcttcgccccgaccaaaacgggccccacctccgcctcctccgccacaacaaagttcatcagtatatcctcgcagtttcgcacctcgtccacgaccccccgcatgcgcgccatgcggggcccaccccgacatgtgtaaaggaacaggtagcgtgtctttaacaacatgaacttcgtaagcacgatggagaaccggtccgggtggaccgtgtaggcccactcccttcggtccaggtcgaaatcatgcgaccgcgcgaatagcccaactaaccggtgcgggttttgcgtccagacgcgaaacgcaaattccaaggttgtggggtccacctccacgtcgtcatcgcagaccaaaacggcgtcagtggagatgtcattggggcgcgggaggaagcggttgttgaggctggtggagggttgggggagaagtgagattggtgctgagaaggaagaaaagagggtgaggttgtgggccaattggtgaaggacacgtggcgatgtggcagggttgccccagaggacgagcacggaggacacgatgggggagagggagtacgaggcggccagggattggaggagcgggatgcgggactccgagaagccgttcatgaggacagtgagtttgtcgcgacggaggatctgcgggttctgattcggttccggcacgcattccagtgggcctggtggtattgttgcggttgaaacaacgctgattagggatacggcaaggaggatggtcgtcgccagtgaagtcattgatcggttgaacggcttttgaatttccaaattcgatgaaggttgtaccaatttgataaattcctgcacaaatacccgaataactacaacgatcatcatcttttgtgcacataataaatgttcatagaaagttcaagattacaatacaagacttgtgatgcactccctcactcattcacttttcaaagtaacagaatgtaaatatgtgtaatattattgaagtatgataataaaaaacagataatggatgatcatcatttcatccctagcctaagcttcatacagagaactcctctgcctcaatttcactagttacttaatatatattgtacaatgtaaaaagaaaatgatgtattcgtgcaatttggggtagnaggttggaaacatctaataataatgaagtcataattccaatgtataacttaatattttagtttgctttttttttttttctttttctaaataacacgggaagtatgatttccattgcccattgccattaagttctttttaaaaaaaaaaattgaaatgatacaatgcagatcaaaatttctgtgatggcattgactctgtcattctaagttttcttctaacaggactcgcaatggcggtgctaataacgataatattatgggagggaaggccattgtttgctcctgaaaccagcattcatgagttgctaggatacatgtttgcaccaattcatcaggtatgctcttgcacccattttcaccttgtttgtgcttttattgtgtaatttggtgtgtggttgcaaattagggctgtggaggagcagaagggtttgtttaatttgttatttatgtttattggtgacttgttaggtaaatttttgattggtttgtagtgggatcgagtggattttgaccattggtttgactttcacttggggtttgggcgcacattggatttatttttggagtttgagctttcattctgatttcggtacataatcactcatttcccctaaggagaagtgctaaaattatagtaaatcttggtttcatagtgtaaaatgcttcacgctggatatgctttggcattgttggatgtctataagcaatacttttgagttatgaaacacacatgtttagctgctaaacataattgttgagaactgagttggggaagaaattcctgctgcatccagtatgtttagctacaatcagtttttaactttgttgttccctatatcaatattcattttggccattttcctatcttcaaatttgcatcaatgatagattggagtgaagattctcagtagctgtttacattgaagaacttggtcatgtccctgggtcttaatctagaggaaccttaaaatctcataagcttcgattaataatttgtagttgtattcttcaattctcttatttaatttcgcgttcttaatctaaagatcaatcaattatggttatcccaagctgatcactgtttcttggattactctatttcggttatttggagtggagattgggatagaatttgctttatggacctgcaggttttagtagtaaaacactcattgcccatgctgttagcatagatgcaataatttctgttactaataattgcattggaaaacatttgagttttgaataaatcaaatgatttaacttggttgaattgttgggacctttttaaataaaaatgttgtagaaagtgtgattgatttatatgccctctcttatttaaatttaaagtttgggcttctcccttgagcttgatagttttcgttacttaaatattttatcatttcataatcaattgatttcaaatcttattgtaagaatgatttatacaatcaattattttggtcttttcctcaaacaaaagggaaaaacaaaagcataaatccaaagccggaccatgcactcaaactatttcaatttcacctcgtgaataaaccaatttcacatcgtgaacaaaaattgttctgattgccacattccttccgtgaccaaaaaaataaaaaagcttcgacggatcatttgatataatcataggcaaattgatcacctagtcaaattgtgaaaaagaaccaaatcagaatggttccctactcaaaaattgttaaaaacaagtatctagacaacgattccaaaaaagaaaacacctttttttggcagaaaaacatttgcaggatccttaaaataaataaataatgtgcttgagcttactagacaagcttcacagaaaatctcagcgagtctgaagagcaaaagcatttaatttacgagtagtttaacacctttcatgccatttaacagtggcaagaaggctgcctgaataacaactcgatagttacattttaaaaatctccaattttcactattaaataaacacggactcattatattaaaggagggtaataaaaacaaaagcaaaaacaaatgtatcaaccttaccaaagagatccgctagacccactaaaaaaaactcggtagcgaaagttagtgaaaaggttgatagggtttgatattgggtgctgcattcatctctaaggcaagggtttataaagccaaagaaccaaactccagacccttatatgtgacaaaaaaaaaaaccaacacagaacaagaatagattagattgaaaccctaacacacaaatctgagacagacacaatggttgcatttcgtttgtttgaaactgtagtagaccaattacgccgcttgttaaccctaagcatgaagtggagggggattcgtgagtgtatatatagcgaacaagatagtaagtatgtcgctgtgttaaacttaaactgttaatactgttgggccagagtattttggatttatgtctggcccgttaaaacaaaaacatacatcagtattactattggtccctctaaaattgcacttaatccctaacaatcaagtgtaattaccaaaataccctcaaggcatttcaccccatcacccttacctccttccctttcttcattcctttaatcctttcctatctccctttcttcattctgttatcttttgctctctccctttcttcattccttcattcattccttttttccctctatcccctttcttcactctttgcactcattgcactcatgttgttgaaggtattttttttctgttttgtaaacatagtggaatcataatttcattttttcgtatttttgtataacacaatgaaatcgtaattcaattgtattatagtttttgttatgtcacgaaatcatgatattgagagaaattaagaattttaactatttcttagattcatggaaccaattcaattcaacgggatttttcattcatatatattttttccatcaagagagttttataaaattcttggactcccaaatttggagtatcccactttcacgcaattcatagagtttaacaagcaatcaatatttcagagggttcaaatttctcaaatgcatactcttgcaaaaaagaagtctcccctccattttcaattgatacaatcaatgaagatttcttttttttgatcggccaaagttagttgttaaatgctagtttttttgttagcggagggattcgaacccacgacctctccctcccacctttcttgggacttttcacccaatcacccaaccaaccttatatctccacaatcaatgaagatgactctgtttcaattcatttcctccaacacataagatataaagaaacttaaaatctctttcattccttttcaaccatattcacgtgcctttatctcatctaaccgcatgagctcaaggcaatttgctagtggaatttgcaaccattcccaacattttccaacacccacattcaaacatactagttactagtagtagtgtctgttgctactcaacctcaatcacgcacatcctggaccattactcactatttgttcccaccactgtcagcttgcaaatcttcttttttgtatcaccttctattctgctacttaaccacccaacacccatcattatatttttttgactaatttatcaattctctataagttggatagttttttttgtttttaagcatttataaatataaattatttacgttatcaacctataatctcaacttaatggccatcctactattccaccatagcatttttggtattgtcactttgtgttgctattcagtattgataaccctgccagacattcttcattatatttcatataatacctcccaccaaacatgtgtataatttatcagtcactgcatcaaacatcaattcggacataaaacatttgatgccctcacactcaagaaaaaattaaatatatacaaaaaaaaaaaactacgtaccccattgcccagaggctccacgctatgcgcaggtaagggggatggatattgtacgcaatcttacccttgcatatgcaaagaggctgtttccggattcgaacccatgaccaataaattaccaagacacaactttaccgctgtgtcaggactcgccctcacaaaattaaatatatacaaacacctaaaattaaagaaaaatataaaagtaatgataatcaaggaagttaggcattgttattcaacttacctttacatcatattttgaaccaagtggaaaattggcatcatatcgaaaagcataatcttctttgtcaatttcatcctcgtcaaattcaaagtatgtggcagcattcttcagttttccatccattccattagttaatgtgtcataagtttcttctagatcatgcatcctctcagaactagcaccatttactgaacgaggtctttgtctggccattccctgttgattaaacttttcaaaaatggaatcaagttggcaatatctcccgcgatttccaccaaactgctcatactccacaggagattctgaattgttaaactgctgataaccagttgcattatctgctcaaacattgggtaagcagatcataaggattaatcagtgaatccactatatgagagacaaagacataaagaacaaatttgaaacatcctcatagaatttggaatactgtaatttttaaacagatcacgcactattatttatacttacatgagttgggtacagtactactacctccagacctaaaaataggcaaaaataactaaaactttatgttgattaagttagttaatgtcatttattctactaatcacatttaaaaaacaaacatttttcctgaagttcattggaatttgatatcaagaacaaaaatgagtcattggaactagaatcacaactaattgaagggtattttggggatggtatcattaaataggatcaaagtagttaaaatttgcttatatttgagtccaaaatattttttgttgtttcttatatttaggtccggaggtagtaaatgctaataaagtcctaatgagatgttaatgtcacatgtaacatgtgctgaaatctgattaggaatgtctacatcatacatgtgttacgtatgctatatctaacaatcctacccgtagaaagactaagtcaattgtaacagaacacttgaaattctaatcctgattaaagcttacatccatagagggtttactatataacatttttctttccttttattccaaaaaataatgcaaacctcccctgttttgaatatttaacagaaatatacttcatttttggccaaggcacaacactacatattgtgaaaaataaaattcagaagtgtagttaactcttctcagtactggacaaaatgtacaaatacccaagaacatgaagagaagcaatttgccaggacgctacttcacccagaaacaaatagaagacagcagatgatagtcattaatcagcttaagaaaacagaaaacaggtctgcatagccaataaaattgtaggtcaataggtccaactcaagtcagacctgaatgcctgatcctccatgtaaacaactaaacattactcttacactctaggaacccatctatattcccctcccctgcccaggtgctccattttccttcataactacaaacaagtgtcaatcccaagtgtctgatttcagaaaggatgaatactcccaaaagaataaatatttcacatcatttaagaagaatctttaactaaaggcagtccattctatatttacctcagccttagtactcagcatggtaattctttagtttgcttttctcaatctttggctattggatcccagattttggactttggtgcttttgatcatcatattgtagttaacttggtaactcttctattttctcaaatttgcctcccaaaaaaatttcttactttagcacccttgaaaaaggctttgaggtcaaagctacaggcattggtggtggtgagaaaagtgatcaaaattcaaagagataaaagggggaaagatggcatgggttaagtgggaaaaagtgtgtctaccaaaggaggaagggggttgggaataaagaatattcaattgttcagtgatgctttgttagctaaatggatgtggatattgttagtacataaagagtccatgtggcataaagtgatctcttccaagtatggtctcttttattagagccgggtgggtgtggctagaaacaaggttgatagatggtggacagatatcgaaagtgtatggggatgttggggtcaaggagggtggtttgaagacaatattgagtggatgatcaaaaatgggaaagtggcggatttttggcatcaaaatattgttgggggggaagctttggtaacaaagtaccctagaaagattgcgtcactagggggagatgggtgggtggttggaagggtcatgggtttggaggttggcatgcaaaagggagtggtttgaatgggagaaacctatggtgcgaaggtttatggaggatgttaataaggtggtgttgcatcaagggtaagaagattcgtggtgctggaaaccatagcacagggaatttgtttggcgagggatgtgtataaaatcttgctacataatgatattgtgggtgatgatttagtggtgttcaagcggatgtggaagtacgcagccccatcaaatgtcacagccttcacttggagactatattcgtataagagtacagaccaaaagcaatttgagaatcaggaatctgtgcttgacggtgactcatatatgtgtcccttttgtgaattggaaggagaaaaatgcataacatttattctttggctgtagtttttcctttgctgtgtggaataattgctacaggtggttgagtgtgcagatggctcaacattcagaaccgagaagtcacttcttgtaacacctaggggtgggagctagcaaaaaagcaaatcagatgtagcaagctgtttggatggcggttgtgtggaccatttggcttcaccgaaataccattgttttcaatagtatagtgaagaatgaaagtaaggtgtgtgaacattaaaacaagatcttggctctgggtcttggccaaaatcaatcattgctcttcatcttggagcacatggacatcagacccaaatttatgtctagtttgatggattcggtgactatagggtgaattgctttgtaggggaattaatgcctagttttgttttaaatggaagcaacatatgcagggcatgtattcactgatgctgaatactatggtggggccgtgaggggatagtggccgaaggcttcacatggaattctgttattgcttatgtttgtttattgtattttgtaaggtaatgctgggttggagttatattgggaaaggggctttatgtggttcttttcttttttgtaactttgttcccataaccttcatgtaagtgcttggtactgctggtaccttattattaatacattgattttccctaccaaaaacaaagctacaggcattggtcaggaactcttcttccatctgtagctttggattcagcttttctctttcctgattgtccattcaatttagcttcaatcagtcaataacccatcatcttaactgttcaataacctttttctctaaatctttttacataaagaaccagagtacaggaaagatgattggtgcatgtttcgaatcatgcatgaagagtccattatctctagtctactttctgttgttagtactattactgaatacaaatctcctcaatccttatccaagctaataactttaaaaggatggttctcaatctctcccatttgaagtcttttgaatgtgaatcatacaacttaataaacatgctcgatcttctttccaagtaaagaaaacagttgctctaaatttctacttgaaattgttcattcagatgtttaaggactgtgacatgttagttctattctatcataggtttttgagattgtgacctttattgatgacttctcaagatagacttggatatttctgatgaaagatcatttagaattgtttgaaatttttctaaatttttgttgtaaaattcagactcaatttggactttgtttgcatcttgtgaagtgaaaatacaaaagaatatttgtttacctcattcaaattgtttatgtcctcctgtggcatgcttcatcagttcaattatctgcatacaccacaacgaataggtattgcaaaataatcttcttgatactactcgtaccttaataatctaagccaacgcttcctcttatagttttaggcagatgaaattttgctgctggatacttgataaaccgcatgctatcgttagccttgattaatcaagttccttattccatcctacttcctactataattttgtttctctatcaaaaaaaaaaaaaaacacttcgtactataaaacaagtaactagtaacacaacatacaagtcactgctaacacaattcatccttaacaatgatgatagatatccatggaaatataattgtaaaaaatttgtccctcaactctacatttgtttatcatcatttacagtaacactaaccagattccaaaaaaagaattttacttattggttaaactacaatagttaaaacattacacaaaattaaaatacattcttacctatgagccaaaacttttccacttttaacaatggtaagaggcatttagcacacaggctgacaagcctcattatcccttttggttcactagaaaacttttgatcacagaggagtaaagcataaaacattgacaaactcaaccgtaatggaaaccgaacatgtaaacagccaaatcatcaaaatcaattactaatatatcagcaacaatgctgaaaggcagagagcattgctaaaaatgaaggcaataaacaatacccagtacctgtaaatctccatgaggaaagacttctgagcaagtggctctgatgaaactggtctggcaaattagcacttaatgacctaattgcaactgaaacaatcttcatttgcttcctgcttcaaacaaaaaagtttaaagttgtcaattgttgtcaatttataagctctacattagattttacagtagctaaaaatataacagcacacaaattacagaggtaattgatttcacttctgttaccctgaaatttaaatttctaactaaacctcaagaaatgtctcaaatatttccccatctaatgcaattgtatcacaaaatttcaaaataaatcatagctttcagttttaaggacaatcatcatacatggtagttagtatcgtacgattcgcgatgcgtatcccacgattcgatacgattccagcttctaccaatacgtatcagaggttggctcgtttttgttcctaaatcgcgatttcgagacgaatcgcacgattcttcaccggcgtggcttaagacgagcgtgtttccgcgtctctatttactcagccgtggcagtgcgaagctaaagtagttttagatttagagttcccttgaaaatgtttgggcttgctggtctaggacaaattgggcttacgtgattttaataagtaagtaagtgatgagcttctgcaccattaacttttctcatacaccatattaaaacagtgaatttccttaattgccctttccactaccttctaattttcaaaaacattttactcccttcccttcccgcaccatttcctgctccgttcgcgcaccatttcttgctctctccctgcgccgttccagctccctgctccaactgttgataccagctgcattggaagtgttgaacaagtcgtggtgaccgttgatacatcctcttctctgtttggtgggcacgacattgtgaggtaagtccctcggtttttaatgggtgcatttgtgtaaggcttttgtgcgtgtcgtgtcggtgtgtactgggtggtcggtggttaatggctgtccatggtggtgtgtggtgatcggtaatgacggaaacggtggcttggacatccgtaaggggtgtaatccgtaaagttcatacggattacctaatccgtgagacctctacgaatcgcctaatccgtgtgtatgctgcagattgccggatccgtatcccccttacggattgtgtaatctgtattattcgtacggattaatcaatccgtatgaataatacggattacacaatccgtaatggggacatggatccatcaatccgtataggacctatttgcttaaaaaatggatttttcagaagaaaaaaaatgaaaaataattaaggaaaaacagccaatatatgtgcttgttagcgaaaatagataatttcatgtgtacatatgattagaaatggatatggttgtgaagatgagctgttgaaaggatttattggttggttttaattagagttggacttgaatatgtaggaagcttgtgaattgcagtggttgaacccttaatatgcccttactcattgacatgatggcagctagaagtagattaaacttaatatgcccttaatctacttgtgtcatacttccaattaggggtgggcaaaaaaatctggtatccaaatgtaatccaataactgatctagtttaatctattttatttatttttaatagatcagattttttatcatatccatattttatatccatttataaatctaaaattcattgtctttttatacagatttaagtgaaaaatccaaatccattatatacaaaggttggcgttgaatactaactgcacgcgaggaaagtaggggtaactgcgcgcgaggaaagtaggagaaatatgaggcggaaaaaacagtctcttacagttttgtcatttccatgttgtttgcaattttttatattttatgtgtaagcatttaaagccactaagcgcattccaacccagaagagggaagctaaaaacaaaaacgtattgcattttttaaagaatatatacatatatatatatattcgaatttgttaattctgcccatatttttctcttctttcttcttcattaaatcaacttcataatttttaaataatatagacactaatgaggtaaaaaaaattgcaaaagtgctgccatcaatttgtttttggttggattggatgggtctctctttactcatcttgtctgctcatgatttttactttctaattatttactcattacttgaatgaatagtaaataagctttatcttatatagtaataattaagacatctgcagtacaatatcaatagtctaggaaaaaaaactatataatataatattcaaaatcttatatcataagtttaaaaatatctcaatcctataaaattagttgtaagatgagaattacttggatgattgtgttgtggtggatgtcggataaattttctaacacacaaagcccaaagctataactcatttaattaacatatttagtatttgaagtaatttttatcaaattcaagtgaataggtgctaaatttttattttttagtgtttaattattaaaatttatataaaaaaattataaatttaagtggatataaattggatatatccatattcatatccatatccacttaaatggattggatcttgaatccaaattgtttttagaaaaatatggatatagatttaagatctaatccatttaaataaatataaattagatatagattagatttttaaaaatccaatccatgcccacccctacttccaattaacataattttgtgtaacatgtgctcctatgataatgttattgcaaggctgaaactttcaagttgtattgagaacttgttattgtagctagctgacatagatcgctcctattataatgtttctgctgattctattggtactcttttagaatccatttgtctgcaataatcaattatgatagcaagtatatgttaagattagctcttgatgtgtctataatataacatgcacctacaaacttgagagtacacaatgataatcgatgtctatgcagttttatgccatatatgacgcgtatagacattgccattactggatatgacgatttctgagattggcatgtacgacgcgttctcctcagtgagactaatcttgaataaattctttctaaatctttccttcacattctaaatgaaaattttgaccatttaaaacaaaaatataagattgatcacaaaatattctatttataatcaaatgtctttttcaaaacagaaaaagtggatcacatttaataatataaaagactcttttctttaagtgtttgaggttcattggacatattgtctagggtctttgatgctcttagcacaattacttgtggtctccattgtttactagtgagacgaagtttgttttgttttaccttagtagaaccctcatatgttataataagagtgtcccatatttcattggcatttttaaagctatgaaccttcatgtattcctcgtcaaacaagggacatattatggagttccttactttggagttcaattaatagctttccttttgctcattagttcatctttcccttggaagctcattaagattgtcatcataggggtttaacccaaggggtcaaaatcgaataccatctcatatcaggaaaggggttgaataccatgtcacttatgactacaacaagtattctctatgtcagatttgagtgtccaacacttttttacagagtgttgacacttgtatgatatgaatggtttcttatgtctgaaatacactatacagatgcagattatggctaggacgagaggaggagtgcgtcggcctgttggccgaagtcctaacgattcagagattagacatgggagaggtgatcagcatgatgtccctgagcggcgtaggcccactgcatctgcacgtcgtcgtagggcgagtgttgctattgatgatgttcctgctgtgcaggtaccagacgtggagacgactgatccggtcaccgaggatatggacacagtgtcgaaatctttccccggagggccggaagattcatctgcgctgaccgggtttcgcgatcatgtggctctacgcgtctgggccggagaggtattgacatgttgaattacatagtcgaatgtcgtaatacatttggttatacattaatgttttaccttaaataatatgttcaatgcaggaacgtgtagaattgaagcttgcttcccatggccgtaaggtcattaaattcgggaagcctgtagctgagattgagggcattgtggctgccactagcctgagtccattgattggatgctcagtggagacaggtgatagggggttgctatccgcatttgttgagcggtggcaccccgagacatgttcctttcactttcctgtaggcgagatgacattgacgcttaacgatgtgtcatcactgctgcatctccctgttatggggacattcgactcgtacgagcagctggaggtcgacgaggcgatgacattgttggtggagctacttgatgtcactgtggaggaggctgcagcagagacatcccagtgtcatgggccttatgttagactatcatggctcagggacacatattacacgaaggtcgaggcgaggcagtggattttggccgccagggcatatctacttcaccttgttggttgcacattgttcgccaacaagagtgccacgcatatagctgtggtattcttggaggcgtttcgagacttcaaccgttctgtcggattcgcgtggggtgcggctgctcttatccacatgtatcagaacttgagctacgcatgtcagcatcacgggaaacatcttgcaggatacatcactctgttacaggtaatgagataacatgttttgatgtgtagcatgacaaaaccttattttatatgtgttttgtttccattatttgatgatttgcatgcttttaaatttttagtgctggatatacgagcattttcctactataggaaatgttcttgcagacgagcactatgacgagaggcaacctcgatcttgcaggtggacgagcgtgaaggccttaccggtggcaacctatcgtggacgtatagataggttgacaccgtctgatatttgttggacacctttcgtggagcatcggccgcacagggagtttcagtccatcagtttattctccggtttcctcagatggggtcctcacgtgactaggtatctacctcagagggtgcttaggcagtttggccatgttcagcatattccaccccagcctgtgacagatgttccttctttggaagacattaaagacaggtgggttcactttgcagagcacattgtggacaccggagacttggttgattatccaggtcattgtggtgttgcatacatggggtggttctcccgcatttcccatccattcatgaccctagctcggtatgaggagacgacttcccaaattccaccagtgcttgagcgtgcactgtcccatacccattcccatggtccttcttctgatccacccactgatggacatggtccttcttctgatccacccactgatggacatgagcagagaccacttcatgccttggtattcattgtttatttcataagtatttcacgttcaatttcacatgttccatttgttaaccaaattgtattgtttatttgtagcatgcgtgccaacatgttgcggagggcctccagcatatgcttgacatgaggatggtgacagaaggcacagatgcatactccatgatagagcagctgctgcaccatgttcgaggcatgactgaggatgaccttgtctacacccgagctagacagagtttcagaccacagaggaggcgtcctcattagcacagtctttgatatttatgttattgtacattgattattcgatattaggaaaatttatttgtaatttcagacagttactcagaacattgatatgagataacatgtttgactcattgaccattttatatcacataacaaatacatttgcattgttttgatacatgtctatacatttcccaaatcaacatatgttgtgcgcaacttcatggatttggtatacatttgcattcgatcaacgtaatggtaaggccactgctgagcatcggtggtacagtgattagcccacaaacatgccgtcaacggtaagggacaattgtcgatcagagttacctgttttaaataaattgttacacaaatcatgaatctcataaattaaattttaagcatgcatcccaattaaatagtttgtgtgttaccttaacaaaatggtttcgaaacacatgcccaatgcacaaaactctatgaaatcgtggatctgtaggaggttggcccctcagtggaaaaaaggtcatactttgctgtagtgacaggatactagaatgatgttatatcgtgatgcaatcacatgacccatgtctgtgatatccatccacttctccatcgttacctgcaaatcatcagttaatcaaacatgcattacaaatataaaaaatttccaaatcatgttaaataaaataaaaacaaagtttcaccttggacaatccatcaactaatagggagcgctttaacatttcaaacctatgtatcccaccgaacaatgctatatattgatcagtccattgtgcaagttccttaagcagatgattgcgcactagtgaccaagcctcttcactgtaacctaataaggcagcaataactcgatatccgtaatttccatcagcttttacatcagtaatgtccacaataaatttgtgcataaatggattaaattcatcgagcataggaaccatccagtttttcattagaacattagatgaggagttgcactgtataggagtagagcaactgttctgcacagagtgtaactcatccacatactcgaagtaagacgggtcccttcgtgtcgaacgttcgtgcttcgagatgtttttcttctgagcacctctagttttgaccttagcaggtggagggcacatggaattcaaatcaagatatgctatttctttaagctttgactttagtgttatttttccacacaaatcaagcttatcaaaacgattagatatggcttccatctcatctgttatggttacttggttttcattttgatcatcgtacgaaaagtttaatctccgccaaaacacatgaacagtgttaactggaatgcttccaataacatacttggataactcacatgcacaaggcaaaccatacgatgttctaagcacacaaccacaacgagatgggttttttcccgcatgatgcacccgttcatactcagcagcaatttgatttaacgcatacatagacaccatgccaatgagtctcttgtataacgtcactttaaaaacatgtccaaccacatgtgtacttctttccagagatgtcttgatttcagtatgttgcaaggttatcatattgttcattgcatcccaaaccgtgcataaataaccaagactattctgcagcaacctcttcaaggtccaatgggcaaaatcaaccttgcaatttacaatataatcaattaatttaaaagaatttatacatatgcgaatgataatttaagacaaggaaagtcacctgttggttgttgtgttcccaaaatgcattactttatttgtccaagctgtcacaaatttttctttgtgcggagtcaaccaggtgtccttaacgtaatcaacgaacgttggccacggagcacatgcaacctcaaacttcataacataatcatcaaattcattctccttagcacagtcgacaacactttcccatgcttccatcacataatcctatgcattctgctgtcggatataagttttgcatttcgccttcacattcttctcaatgcgaaacctgcacaataaattggttgcctctggaaaaatggtttcgactgcactcatcaatgctaaatctctgtctgtaacaattaccttagggaaaaattcacttttcagaaaaatctctctaaaccgttcaagggcccacaccacattgttcgtacgttccgcctctaaatatgcaaatgcaacactgaatgtcatcccagtaggtgttacaccaacaatgtcaagcaaaggtagcctgtacctgtttgttttgtaagtgttgtctatcaagaacaccatatgatatacattgtttaattgtattgcatccggatgtgcccaaaacaagtctcgcataacattttcatccttcactcgatgccaatggacatacatgtcacgctcaagaagtttcattagctgttgcatttcagtattagcgcctcttgtacgcgtccgatatgcatatcttgcattgtaaatttgtttcaaacttgttacgttatctgcattgtgctccttcaaggttagcaaaatatttttgggtttgaccatcgcccttgtcatatcagcaacaattgtcttctcatcagttattcggccagcatatgggtgtccacaaaatgacttggccaatacatgattatgattaccacatattaccttcacaatccacccttcactttacgcgattggtttggcccgcagcttaaaaggacactcgcattttctactacttgtggttgaaggtaaaaaaccttttttccatgctctatactttccacttctttcacaaccaattaacacaaatgacgtgcttcctatttttccggtcttggtgtcactcctcatgataaccgccacaaaaccattctcagatgcaacagtacgagcccacctcaataccgcatcacgcgattcaaacacctacacaaaaagatatttgatatttaagtgtaactcattcctattatttaagtgtaactcatccacatactcacctcatttgtttggaacgctgtagaacaatcaataaaacaatctttgtcgtcaaagtcatcagggtctggtccaatgtcttcattcatgtaaatatcttcagccatgatactctcgtacatccactcatcgttatccattctaacaaaagaaaatacaacttaacataccatgtaaaaacacacacatacatggtaaataataacattgactaacgttaaaatcccacacaaaaatcatattcattaaacagttaatagaaaagcatgtgcaagggtaaattgacttaatgacattgacaacactgctggtcaaaaaactggagacagcacatgcccgacacaccatgtgaaatggtcaaatgacacatgcctgacacaccatgtgcaatggtcaaatgtcacgagttaatgtcagtcgaaattgactacaccatgcactatattgataaaagccaaatttcaataatgacatgctacatggtgtatctaataaaatacaaatttcaataatgacatgctatcagatacacaactacccaactataaataacacggacaccctacatgttttgtcattctcccatataacatacatctgcaaaataaaatcaatcaacactatggcattcttaggagaaaccagcactcagaccattgctaactccaaattagcattcatttttccaaatggatcaatcaaacacgacgaaactggtgtttcttttcaatgtctcactccaatgccaatgcgagttcctgatgagagttcttttcaggcactcaagaccaggattcacaacacacttctactaacccatgaccaatttgttgatgaaatgtactatcgacaaccatctatacatgcaggtcaacaattttttttcattctctgcaactgacaaatgatgatgatgtttgcacaatgttaatgtccagtgagaaaatgtcagctattggtcctatagaaatatgttgtacaatcaacagaacagccgacggtatactaaacttacttcaatctacaattggccgaacacatgatgcaatgttatattacaacggcaaatgggacaaagcacgacaaagcggttatggtctgggttattctttcactggaacaaatccaaaaaggtttcaaatacccttaggatgcaacattcaaacactcaaggatgtcatcaagcaagttgcacctgttgggatttccccttatggaattcacaattcacaggtggtaagaaaattatttttttgacaaccatcccactacgcttattcagacaacacaatccaatatcacataaaagagttgataagcgatgaagatgtgttaaaggtcttagccgaatccaactattggaaacgttttggtccaatagaaatccttgctatttttaacaagccagttacccaagaagcccaatcaaccgatcaacaggggtatacaatggatgcaaatgtttcgcataatgctcactagaatgatacaaatgaaagaaaaacacatccactgcacaacatctttcaaacaatgatcactttgcttattttcgcatttcaaatgttattgttacaactttatgctatgttagtctattaactagtgttctgtcatatttgtctattggttagcattttgtcatatttatctccttctctgtcgtatgaattacatatgcttttaattttaaaaactacggattgtgtatacagtattccattatttatgctcaattttagcattctaaaattaatttcctttttttaaagtttttttttaaaatttttgtaccatacggattatacaatccgtatagctcatacggattggttaatccgtgtagtctatacggattgtgtaatccgtatagctcatacggattggttaatctgtgtagtttatacggattgcacattgccttacggattaccaaacacgcctacagattacccaatccgtacgggaacttcgaactcacttgaaaccgcgctttctctccggcgacaccaaaccaaaaatggagttgactgcagctcgtccacctccaaaatagctccaaatgcgcaacaacaacctcaacaatgccgattccaaggaatgtcaagctcaaagaatggatcgaagcatagcaactcacagctctctctcctttactttactttagttgtttatatatttttttcattcattaaggccattttgggtactatgcaaaagttaaatggtgtatgagaaaaggtaatggtgtatgaagcacaccccactaagtaaccctccctcacgtaaacataaggccaaatatgtaattttgggtcctttatttttcataattctcaattttagtcatccaattttaaaattgaaacatttaatttcttattttttaaaatcagtaattttcgtccccatccaaattttaaagatcgacttaggcatggcaacgagggcagtcgggagcggtttttgcttaccctgccactgcccccgcctctaaaaccccacccctgccccgcccccgaacatcgacgggaccaagaatttgcccccaccctcgccctcgacgggggtcggtttttcccgccccaacccacccccgaaatacacttaaaaaattcctattaaaagaagacaatagcaaagagttagaaaagtataagacaacactcatgtgattgacttgttcctcctctgtactcagcgctcacttcttagttcttatttattacaccagttcaaaacaattgtttccaaaaagcatcaaattgcataagaagacattctaaggaatttaacaaattgaactgagatatatagttttaatcatattacacacataattgtcttaattttagttagtgaaagaaaatccatattattgttagatcacatgtttggttaataagatcacagaggaacattgaatcagtttagctttttgttgttttcattagggaattttctaaatctactgcagctgatgactttggtttggaatcaaaacacatcacccaggaagccagaaaataccccattgcatttcctgtaaagcattatattgcaaaattaacaaaaatcttatgtatcctctaagtgttctaaaagaaaaagttgttaggtggaggcacttaaatgatttgatatttctatcacaccccctcatgcaacatctctttggggttaaagagagcacaatacactggtccacctaccaacattgaacactagaccgcttggtcacaaaggttctaatatcataccaaaagatcaattgtcccaaaagctttaaattgttatgtggcacataaatggttttctatttgtattacttaaaaaataaaatcatttcccttcattaagatgaacattttgatgctagcaaaattcagcttgcacgagttgtgcaataatacatcataccagacaatcatatgtgaattcaatattttccgagacccaaaacaaaaccaaaacaaaacatattctatacacaacatagttgtcttcattgtcctccttcctttatagaaaaactaaaccatattctatacacaacaatctcagttttcaaattattatctttaaaaggttttccccaacaaaccagataaagtaaattttgagaccaaatcatacattatcctatgagctcttgtccgaaaaagtaagtgttcttgtctagttaattcatcaccatataaagaataaaaatataaccccatatctgagaaacagggagaaataattcaaagaatcacaaaattgcaatgggattcagatatgagtgcttacaacttacaaggataccaaactgaaacacagtttcgtggattctatttttctcctccaaccaaatcaatcagagaacgagaagctacgaggtcgtgagcaatggtgcatgatagcggtgcatgagcaatggtgcgtgacgacgatgcgtgagcagcggtgcgtgagtaagtggtgtgagagagaagctacgagaaggataaatgagaactgagaagtgagggttagggtttcgggtttccttcttatatatatacaaggatatttttgtaatttagtaagatggaggcgggggcgggacaaatatcatcaataccaaacccgtttccggcaccgaatttatgaagaggagaaaattcgaactcgaacctgaacccaaacccaataaacttgattttccccatcaaaagtggaacgaattcagacgggttcaaacaggtgcccacgggtgcgagtctgttgccatgtcatctactgttaatttgttaatgttgacaatcatattttattattttattttgtaaatgttaaataaaaacttaaggaaaaaaaaccttccacttaaacccaacctccaccactgctcctccttctcccaccatggcttccaaatcttcaattggatcaccctgacaaaggttccaaacctgggttgaagtttagaaaaaaataatttagttgagatattcaataaactcttattatagaaaggtgtatgttatnnnnnnatatatatatatatatatatatatatatatatatatatatatattcaattttaattataagctttaaaaatatttaaaacaattataaaaaaggataattttttttagcatatataatcaaatcaaatttctcaatatattgttttgcattcttattgatagtctccatcattttttatttataaaaagggataagccattacatttaaatttctctttgaagaactacaccaataaaatcctgccaaagcaaattagaatgttttatttgaataatcaattaaaaaatctaaaaaataatagaattgtttttacagcaaaaagatagaaagatagtttgcaataaataaattggacagacacaaattatgattaatgttgtgattcaccaacaatttatgtaagagacatttgctaaaatgtcttatctactattaaaatacacattaacatttttttaaaatcaaaatatacattaattttttatcctcatttaaaaatagaaaaattataaaatatgtatgtagaaaatgatgatgtaaaatatatatatatatatnnnnnnnnnnnnnnnnnnnnnnnnnnnnnnnnnnnnnnnnnnnnnnnnnnnnnnnnnnnnnnnnnnnnnnnnnnnnnnnnacaatggcagttcaaaaacaatgcactataaagcagactaaaaaagtatgaagtcattctttgaccaagttttttaccgcacattatcctttcttcctttttttatattttaaattgaagggtgaaggtgagaaggagaatctaagggagagaaaattttaagggagattaaattattatttcctttttatttataaatgtaaattgaatatacttttttttcattactctatgttatccatttcttgatttttgcaaattgcaaattttgaagcaagttgtgattcattcgagctttatttgatctattttgttgttaagattgattataattactaggtgagtgctccctcaattgaactttcaaatcttttgtaatgatattcctcctaggaaaatataaattcataagttgattcatgaagaagaggacgtaaagacaaaaatgaagccttggatgtataatgtcattgagtcaccctcatgaaagacctcatgatatggttaatgaatcactttactaaaatattgttatttttcaaagagaattttggacatatgttatataaattatttattgtttgaagaattcgtactacaaatatttccatttgtcacaaatttcatctcaaaattaatttttttcagatataaatttcccacagattcatataaatatataagtaacacattgtttattatattaatttatatcatacaaattgaaaacaaaattaatattatttttatttgcatatttcagatacaattacaaaaaaattatattattttggttgcatgtttaggacaagtttcaaatgatttaatattattttacttgtgtgtttcaagcgaatttcaaatgaaaattgatattatctaatttacatttttaatgaaattgagacaaataaatatttacaaacttttgatctttgcaagtagtttgttgaactggatgtgctgaaaagtgcttggaaatcaacttcaacgattgaattaacaagcaacaagtagttcccatataagttatgactacaatgcttgtgaggcaaatctagtaagcacaagcacaaatgacaagggtacacatttcactttaattgtttaaactgtaggattttacaatgattggtattgccattaggcaaattctatgctagtcttgtagttgttgctgcttctattttctttttctttttcttttaacttttgcttatatattttgcagtcttattttatcaattatgtgacacaattgtgtgccccttctgtaatggttgatgattggcctttcattgctgatgaaagtgaagctacagcctctccaactgtcaagaaaaggttatctgctcttgtgaaatcattagcttcatctgcttttttaagcttttctatgacctcagcaagaggattgaccaacacaagctgtcacaaacaacacacgtgaattagccacacttgctacttaaaacacacataccaaggtgtgtaaagtaaaagtatgtcagagtttagcattcttgcctcaacacccttcttttccagtgttgctttcaactccttgaaaagtgagattccacttgtgtcaacagcactcacagctgaaaatttcaaagtgatactcatcatttttcatgattaaatgagtactatttgcaggataagtaggtagattaaatatgtttagtgatatgcttgaataccaagtgaatttctattagctcaattgcttgattatatgaaaatgcagtcttacaagtgactatttactcctgctcaacctacttagatggaggtgtatgttgaaaatgggaggtgggaacatccatagattttagtaggactttcattattttttgaccacttcattttattggttcaataatccaataagtaacaaagatatcagggaaagatatgttttatcgttacacaaatgatccccaaaactatgaactgaatgttataatgcgtaaactatatgattcacctttgttctatctaacgaagttacctgacatttccatcactaagaatcgaaggctcaattgttcctttatgttgtcttcttcttcttcttcaatccatcgtaacgttctaacataacatgtccatagttgagtaacaggagtcacatctatgcaccaaaatgaaatttacaaaggtgaaactaacctctcgttgagatatgtgatgttagcaaaattgatgggagcctcaatgcttaaaataagaaatccaggtattctcacagcttccttgtattgatcaagatttctatatatgtctgttcctggtatcttccccaacatcactgttttcggcctggtaatttgcaagagtatcttgaaagttgataatccgacctgatcaatagcattgccatcccttgtaaataaaaaacagctatattttgttctacttgcacaaaagggtgctaaaagcatccacactatattttctctgcgttctagtcactcagtcccttgattttttttatttataggaatagaaaatagtaccaaaaaatttataacaactcatgcaccctattcaactaaataccaactgagttagatcccttggtactcagtcccttgtttaaaatgcaggaatatgatttatacaaaagcacttggtcttgttgagcaaggactacaaaaaagcttatgagtagctacaagtgtcaagggaattaaaaccttttatttatctagaaaaactaaaatacattcatagtcttgtaggtattgtacataaaggcaaatccatgataacgtattcacaatgtgagcatcattagcaaaaaattgaagaaataaataaacttacagctagagcaaggcctccttggacagagatgaaaagaacacctaagaaagcagtcatcatcacaacgaaatcgaatttgtcgatcttccaaatgttacaagcagcggggagatcaatgaggccaattactgctgtgactatgattgcgcccagcacgacattaggtgtgtattgaaacaatggcatgagaaaaaggagtgtcaccatgactgtcacagacatcactacatttgacacagctgtttttgcgcctgcgttgttgttaacagctgagcgagagaaagcacctgaatttcacagtttaaatgtgtgtaagtcttgtgtttcattagccttcaggaaagccttttgaaaaggttttcaggtcacaaagaaaaacctgtggtaacatagcaggaagtgaaggagccaacaacattcataaacccaattgccatcatttccttatttccatccactttgtagtttttgagagctgcaaatgtccttcctactgcaataccttcctgttaaaaaacacataaagaaacacttatccattgtcactaatgaaaccaattatgtatgtgtaaatatcatatatactaacacaaggaatgttaataataaactttgtaacacattctttctttcatacacatgatctattataaggagaaatttaggtgctccccactaaatatgaatgagacttattattaaaaaaactcaagcactatgtttaaccaactgaactagaccatctacataaagtgtttcgcatagggtgtgttaaaaaatatgttactaatgtttttttttattaaaattttattttagatgcttgtatgtttacttcaggacttaaataaaaaaaaattgaaagaaaataaaaaagaaaggtggaaaagaaaaatgttaagcttacagtgagggacaaaatcccagtgataagccctgttttcatgactaggcccagatgacttccatgaaagagcaacatattccatgatggaggatttattccttgttgcaattttccaatctagcaacaacatcatcaaacagacaactttgtttagtaattaagctgataatgatttgtggctaaaaaattgttagtgctagactaatgaggatttcatacgcaaatagttagagttgggtggaaaccgtaacttaccacactgatgccatgattttgagccttaattgcaaaaaccaagagggtagagatcatgacgcacataagaggagctccagctgagacccagaatagctttggtttccttatgctctgcatgcatttatttccatgagttagtcaatactaccctgcattcactttaccataaacatgtttttgtcatttcaatttttttgtttgaattaatctaacattttaaacagttttgtgcataagaagatcttgaattttatagatccaatctttaattacatagtcattaatgggtactttccaaaagattgtaggttattattcaaattcaaacatgcctttgcaaaaacattaaaaaaatagaggtttgatttttaattaaaaaaccttagagcaatactaattagtctaaaatatgtttttatatatgataaatactccaattttatatttttcttaatatttgtttctttacattaattctttaacaaaataacaattttgtttttagtaattgacattttttctattccctaatatattaacaaattttgtgtttgttatttgataaaaaaaatcatttattattagtctatttttgttcataataaaaaaaatcattcaaagggactaataacaaataaaataatcataaggaaattaatataaaatttgttaatttatcatagattaaaaaagtgtnnnnnnnnnnnnnnnnnnnnnnnnnnnnnnnnnnnnnnnnnnnnnnnnnnnnnnnnnnnnnnnnnnnnnnnnnnnnnnnnnnnnnnnnnnnnnnnnnnnnnnnnnnnnnnnnnnnnnnnnnnnnnnnnnnnnnnnnnnnnnnnnnnnnnnnnnnnnnnnnnnnnnnnnnnnnnnnnnnnnnnnnnnnnnnnnnnnnnnnnnnnnnnnnnnnnnnnnnnnnnnnnnnnnnnnnnnnnnnnnnnnnnnnnnnnnnnnnnnnnnnnnnnnnnnnnnnnnnnnnnnnnnnnnnnnnnnnnnnnnnnnnnnnnnnnnnnnnnnnnnnnnnnnnnnnnnnnnnnnnnnnnnnnnnnnnnnnnnnnnnnnnnnnnnnnnnnnnnnnnnnnnnnnnnnnnnnnnnnnnnnnnnnnnnnnnnnnnnnnnnnnnnnnnnnnnnnnnnnnnnnnnnnnnnnnnnnnnnnnnnnnnnnnnnnnnnnnnnnnnnnnnnnnnnnnnnnnnnnnnnnnnnnnnnnnnnnnnnnnnnnnnnnnnnnnnnnnnnnnnnnnnnnnnnnnnnnnnnnnnnnnnnnnnnnnnnnnnnnnnnnnnnnnnnnnnnnnnnnnnnnnnnnnnnnnnnnnnnnnnnnnnnnnnnnnnnnnnnnnnnnnnnnnnnnnnnnnnnnnnnnnnnnnnnnnnnnnnnnnnnnnnnnnnnnnnnnnnnnnnnnnnnnnnnnnnnnnnnnnnnnnnnnnnnnnnnnnnnnnnnnnnnnnnnnnnnnnnnnnnnnnnnnnnnnnnnnnnnnnnnnnnnnnnnnnnnnnnnnnnnnnnnnnnnnnnnnnnnnnnnnnnnnnnnnnnnnnnnnnnnnnnnnnnnnnnnnnnnnnnnnnnnnnnnnnnnnnnnnnnnnnnnnnnnnnnnnnnnnnnnnnnnnnnnnnnnnnnnnnnnataacaaattatacaactaacaaagagaaagagaggaaagattaagatgtaataaatgatgtgttaacaaaagaagaaacaaatattgttatatgaattgttctatcaacaactcatctctaattataatactaaattgcatttttgtttaacaagaatgaagacaataatttgaatatataaatattcattagatatccataaaatacatgtagagactctaacatatataaaaactcatctttataaaatgcaaaaatagaaatgtgtactgtgtgtaactcaattgtcattcttactataatatagatttattaaagattcagcttttctaaaatgagaatacccatatatcttagatgaaaaacatgaacacatgcacatatataaaattaattattaatttcttaatgagacaaataaataaataaattattaagctgtaaaaatccaaataaaaattataagttatgattagttttatcttttaaagtgtaatttgctcatttttgttatgactattgattttggcctacatgcataagtccatactccacacacatattatgaagttattaaaatcttaattattaatttttcaattacaggttatttataattatatatatatattctttaaagtataaatttcttaatttatgttataaagattgatttatgcacacgcactcatgtgcacgcatgtgcacagacacgtatagaaaataaattataaaaatattaaaatttcttattaattttgtaattttgtaattttatagaatatataaattaaataattaataaaaattattgtggagtaattaatctttttcaggtaattgttaactttggtcaagaaagttgtcaaattttttttatagtatttcttatttgtcaagtgaagaacacaataaatattaaatatttttagattttaatactattaaatgcatttattttttatttgtcacgtaaaaaacatattaaatatttttataaaataaataataactaatataaaagtcattgtaaagtaattaatttctataaaagaaaagactgtaaggtgtacgggttcaagataggaagggatgaactcaaagttcaccacatcatgctataagtcttaaccctaatccatgtgtgtgaaaattagtacctatgaatataaaatatataatacagaatacaatgttactggttttgtctcatttcttggaagttaagaacttgttaagggtgatttaagtggttgttagtgtgtgtgagaaatctaataagacaaaaaaatgagaaaaaaaaaaaaaaagagaaagagaaagaaattattgcagtaaacaacatacaacgtgtcttgctaatagtaataccaccaagaagcaaatccccatcaatattgtttgccatgaacactgcataaaaaccacagaaacttttttgtaagaaagaatatagaggtagagtctattttagtctagagacaaattaaagaactgtgccagcagtcaaattctgtgtgctcacttgtttgtgcgtaaaagttaaaggagttacctcatgtatattgtgaaaaacagaagtcataacaggaatcagacccatctgattagtgaaatgtgtgattccaagcaggctcttgagctgttgcagtgagacaataattgcagctccagccatgaacccaataagaatggccttagatagaaaatcaattatgaagcctagcctgaaaccattaaaaccaaaaccttgtcttatattgtcttatagtagtatatcagaatgattcttcattcttgtactttttcagattgaaaaaatagtaataataattaaaaattacatgatatggaaaggactaataattctaaatttttttatcagaaaatattaattgttaattttttttgttaacagcaaggatagaacctagggtctttttatcattttcttctttcttaatcacccaaccaaccttatatctcctactaataactctaattaccttaggattccaagtgaagcttgaaagagaccagcaaataatgttgaagtgaaagctagctgaagaaacagaattgggtctgttgtgggagacacttcctgcctcaacatggatcccatcacaagagaagcaatagaaacaggtccaactgcaaggtcctttgagcttccaagaacagcatagacaagtggtggaacaaaactagaatctgaaatatgaaacaaggtcaatcacaataacccataagcatgtgatgtaacataaattagcaccaaacaaactatggagataaatcagtacacttacaaagtccaacaattggaggaagacttgcaagcttagcataactaattccctgaatgacaaaagtcaatagttgaataagaaaagcaagttaaaaatatgagtgaacattttttatgtgagaacgagtttgagcaggattatctccaatgaagaatacgtgtcttattttgtatcaaaaaagaaaagaggcagagtgagaacttgacaaaacctgtgggatggccaagctagcaatagtgaggccagaaacaacgtcagatttgaagagtttgcgattatacttaggaccccattgaagaatagggaacacatattgacctccaaggatcagttttctcttaagaggttgtcccttgaattttcgcagaggatcatcagggaagaaagtttccttgagcctacccttgagtttctgaagggtactcttgtggggtggtgtcacaacttggtgcacttccatggacatctcaatgcaatgagaatgcatagtacatgcattattagtctccattttgaagagaacagaacttatatgagaaaatggtgtgtggtgttattacttattattattaggcttcttagcttcttattgtggtttgagcagtgatgccttttatgtgagactctctctccctgacctacccttgtaatcaacacgtccgcaaaaccgctaaaaacaagatcgcacctatgtcagctaaagtacaagaggataacaacaaattttgggatgtaatttcagaaaatcaaaacacgagaagggatagcttagcgggagctgtgcctgaagtgggcatactatacggttctgctgctaaatatattctacacacactcctcacaaatttggacacttaatttttttcaaccagagaaatcaggtcccacggtatttgttcaagtcatgttacaattcaacagcaagtcatcaatttgagtgagactgaagtttggttttttaaataaaatattgaatttcaattttataaatgaaataaaaagtaattagaaagaaattttttattaaaattgattcattaattagatttttttcaagaataaaattgataaatattttacaccaacatcattatcatgatttaaaaaagtcgtgttaaaatcttatatcactttgtgagacttttgcttaagttgatgagtgaaatcatcacttactacaatattcaacctccactcgaacattactgacatcagggacatcattaacaaaatgattttggctcacaaattcataccaacgtgacgtagttcgttcatgagtttacgtggcatcattgcttaggcagagttctggtctcaacaattgccgtatttaagaaggaatttttgcttcgtatttatcagcatcttagcacaatttgattcaatttttttcattacttggattgaatgattgattctttctttttttcgaatgtatgtattattcttaagaccaattccatatccttagtttgggcctttggggttgtcctcaatcatatagaaatcatttattcagataaagccacatataattaataagctgtctgtttgatttttttaggttaaatttgttttttcctttaatttattattaagatttaatttgtttctttaatttttttggttcaatttggttatctaatttttaaaattaattcaacttaatcttctaattttttatcaatttaattctctaatttttaaaactaatttattttttggaaaatgtatattttatgatggtttaaaataggggtgttcaacggtacgggtcatccgtgaacccgaattgatatgaattgatccaaatagtttgggttggataatttatttatttgggtcaaaaccgaaccgaaccgatcaaaatcgttcatgtacgggttgggtcacgggtttagatttacaaattcgttgacccaatgacccgatccgtgaacccgtaataataatataaattttattatatatattaaaaattaaaaaataatttgacaagaaaaaaagtgtggtattgtaaatgtttaagattgcattaaaaaatatgatagaatattttttaatatagcattaaaaaataggatagaatatttttaagattgtattgcataatataatagaatatctttaagattgcattggataatatgataaaatatatttaggattgcattaaaaaattggttaaaatcatatctttaaattagtataaatagaaacatattttggtgttcatgtatgcattccattccaaataatattagagttttagagaatttatgtttgcatcattgagagaattgttgtgagatcatatagaaccgtttggtaagtctgattcttcaactctccatcaggatttaaagttacttatttgcttaaggaatagaagcgtaaatgtaattattttattgtattcttcttcttgactttagaaatagaatatcagttttatctctattcttgatgaattgagatgtgcaacttctagctgagaaactaggatatctttctggctatcagtctgtctctattgttggtgaattaagactagagctttttgctgggaaacaaggataccatctgagataattgttgtgtaagtgtagactaggaaactatgatactaggaactcttgtacacaaaattatcatagtggagttgtccattggattgattattcaatttggttttttacccaattggattttccacgttaaaattgatttgtcttctttatctcttattttcatattattgatttgagtttgattttaaattattaattattttataaaactcaattcacccctgttgagttcatatgggaccaacacaatattcatatgttataaaagttttaatagcagactttacttttataattaaaaaagttctcgattacttccaaaaattggaccaaatgaaataattttcaatattaaaaaagttttcaattgacttaaattgaccatccacatttttattaaaaaactttcaggtatattgttatttgtttaacttttttttcatattttgtttaccatgtttataatattaattaatcatattttgtttatttgtttgtttgttttagcaaatctggttgcaacgaaattgaatgggggtaactcgatgattcgaaacgaactcaactattcatgaacgggttggatttcaaatttttcttcctgaaaactgaaccgaactcaagagatcaaatttaattgggttgagtcataaatttgatcaaaatcgatccgaatcgacccgcaaatactcttagtttaaaaccacttattaaaagcaattttcaattgctataaagtacaatttttataatttagactaaagaaccaaattaaatcgatttaaaaaattaaaagatcaaattgaataataaataataaattcactaattttaccttttttatgtatgtattaagaccaatttcatatattcactaaaaaaacgaattccatatctttgggtaaaaaattatagatcagattggatataatttttataagtaacaaatctctcttaaaaatatttaataaattatatattgatgattcaaactcaaaaccaattattaaattagaataattctgcaacatttgactcactcactcaatgaattttcttcaatcatataaatatcttttatttaggtaaagccacatacgcagtaaaagaaatagataaagcaacatctaatagacatattttttaaatttctagttatagtcagtatagtggcatataaagtgagaataattcttattttaaaaatgtgacaactataaatttggatgatcatacaatcgtatatgaatatcaaaattaaaagttatttagtgattaagaaaattatgtatatttttctttttaatattaaccctttaaatattatctatatttttctcaaaagaaaaatatctatatttatttcacgtttctcatagtagaaagtcctcttattcgataagttgcctattaatatatgtatttatcaaaagtcaaatatcctttaactttattaagttattataatattctaatgaccaaaaatatctaaattattgtttatgcgcacgagtttttgtgttgcgcgagtaagtttttcaacacgaaatataccaagtgtattttaacttgaataatttcaatcgtttatttgtatagtaccgttataaattgaaaaataaagtataaaatagtagtatatgcaaaactataaatttatatttactaaaggaatgtaagtgtatgtaatttactaaaatatttcggagaatatttgtccaagatattttctttttcctgctaactgcaatgtgactatgcaatgccgtgtagtctcgccaagtctatggcacactcgtatatatgctttgtcgatgtaacatcagaatttctgttttttttttttatctattttaattttaattattcttttttttttgctgaattttaattattttattaactagcttatttactacatgagtactaaatagtagtgttttacttactatgcattcttttgcttctcacttttttcgaaaagaatatattataactcttctttagttttagttattctattagtttattataattttaaaattatcttttacaaccgatgtattttctatatttttatttttattcaatgtagaataaataaaagaaattaatcaaaatacactaaccatgtaatgacttttgtaataatgaaattaaaaattgttaatgtttgtaataactattttaaaaattatatataatttaaattcatttctagttagttaatagtataaaaaaatcttcatattaatgaataatatattaaaattatacgttattaaaatgttaaaataattcataaaatgtacttaatataatttatttttttatagaaacataatatataatttcattaaaatactatgatagtgtctaattttttttatagtcatatgtgtaagatcgatcattgaattttttaagtctcttttagagaataatttttaagtcaaaaaataattattatttttaaacttgtattaataatatacaaatctttatagtgattacatatataataaactgtgtcaacgacgacaacattaattatgtatctctacataagcattatatctcacgagatgttttacgtaaatgcttcacaaacgatgtaaccgacagtcacacccccactcagtaaataatacaaactgaaatcaaacataccatttttatagtgataactcagtcacacccccactcagaaataatacaaacatacaatataagagtcaatcttacttgaagacaagatttaacactgaatgacactgcctctttcaatcaagatcgattcaaataatggttcgtgactttgtgagaacagaaaaaactaacttctttcactaaacctaattcctattcatgttgaaataatggttgggaggggaagtagacagcgagatcattcttccgctaagattagttatctgacttcacatcaataatataattatcaaaaatacaaattcattgtttaaaaaaggagatgaattataattatattaaatatgcataaatgtatgtgataaattataaaagactaaattacacacatatagttatttatcttattttataaattcagatagatttattatcttttaaaaataaattaatttaatcttttatattttgaatttgggtcaattcagtccttccatcacttcagaattaatgttatcaatatttttaacatcatgaaaactaaaaatcattacaaaataatatttattgtcctggatgtatttccacgcacataattaacataacgataatttttaattgtcagtgtaatatttaaaaaattaatatccccttgtcaaaatctaatagatttttgtactaaatttttctcatttttttttcatgaatcttaaaattgacatgggcttattataaatctatgcatttcaatcaaagcgccctagaatttgcagcaaatagaagcctagatcaaaataattgaattagtcatgttaaactgtgcaaagatatgagtttctccagcacaaaaacttgacctaatttattcactttaattctttatcaaattaaaacatttttttaatatgttgcttgggagagacaacctgcaggaaaagcgaactcaaaacatagattgaaacaaactggattttatcaaattcgcaacatgaaaatgtttaattctcccacatgttacaacaaaatttaaagttcatgatagattagttattcacattataatttttaaatagataaagtttaaagtttaattaggacaaaattaaagtttaggatatcgatgtctatttgtaaaaaagagtaaagtttaggagggcttaatttttctcccttttaaatattatagttacgtttaaaaatcatcaaatcatcactgtgttaattatgcttgtgaaaacacttctagtctaataagtattattttgtgataatttttaattggaaatatgttaaaatattattaatagcattaattctaaattgacagaaaggcaaaattagcccaaatttaaaaccaaaaatttaattgaattttttttaaaaaaataaaggattggatctaagaagaaaataaaataaaggataaatgtgtaacttagccattataaaattgtttaaattcaatttttttttcatttctaactaaactagcaatttcaatttttacntgttgggcctatactctttagttgagtccaattaggttgagactatgagaagaatccaaaaattaatataaatatttctacttaagtcattaacaaaaagacagaaaatctaaaaaatacatcttactcattctccctcaaggaatagtgtaaaaaatttgatagaaacaaagagtcaattaaccaaattaaaaacaaagataaacatataaaactataatgattaattatatttcaaaccacaaacactttatatgtttatgcagtattcaatgtgccaacacctatcattgtacaagaataaagccacacgtactaatatatgttagatctagtgtaaagttaattatttttttattaacaccaatcttaactactttaatcatgattaaaacttattatttctctcttcaattatgagggaatcaaactcatatattttttataatttcaggctatgttatcaactgaattatagttattggatatgtaatgaagattagtttttcacaagatggtaaattggaatttttattaagaaaaaatcctcgccgaatatttgaaaagaggtaaagaagttatatactgccatgtggtaatcacaattcacagtctacaattagatagaatagagaaaggaaaataaattcgattaagtgtatgataaaaaggtcggtacctttctgcaaagttaagcagcggtagacatctttctaagtgtaatgcgaccaaacatatgacagcatatggcagaaagcaccaacgtgccatactacaagagctttgtcctctcctagctatggcaacaatcatctaattttccatacattattatattagctaggttccttcatttttgcttataaattatggtacatagagaaagaagaaattaaactttttgtaaccaaaagaaagaattaaagaacacctcccagacactagtgtctcgtgatctttttgcttatttcactttgtaagggttaacaccccaaaatctactcacatctcctgtttctattggaagcaacctatgtgctactgctaacattccccacggaaaatcctgtggtgtctattctttcatgttaaatggtgcgtaaatttgcgaaaaattaatcctacttttattttatatatatatatatatatatatatatatatatatatatatnggttaacaccccaaaatctactcacatctcctgtttctattggaagcaacctatgtgctactgctaacattccccacggaaaatcctgtggtgtctattctttcatgttaaatggtgcgtaaatttgcgaaaaattaatcctacttttatatatatatcatgaaataattaaatattactacttataagattcaattacttaatttgtcagaattaaaaatatgactaattaaattcataataataaatttatcttatatttatatattttttctaaaaatatatgataatcattaataattcttgtgttcttctaaatatacgctaatataatttctcttctatttaatttagaatatattagattaaaaaattaataaaaagatcataatgaattgagtataaaaaaaaataactttaaaatttgagttttataaattgaaattagtattagttattctcccaataaagtatagagatttgcgcagaattcggtgttctattatactcctgtatagagagggcacggccatcttcttaattgacagcataagagtcgtgcaaagccaaaacacatttttaaaattttcttctgtagaattgtccttgtcttaatttggtgaatggattggtgatcaatgctattcactcttctcatgcaagcacaaaccacattgagcatattgaaggaatgtacaagagattctaaccatagaagtagaggtttttgattggtgaaattcacacgtttagaaggacgaatttacttgcttggtctcatttattttacttctaagttgcaattatttttccttttagtcgatacagctgtatttcaaaatccccacataagatgcttcatgaagaaacttggatcaaaatatatgcattttggatattgataagaatagtttatggaaataagtgtgagcactatattatttttatttataaaaattgaagacaaatattgaaaagttagaaatgtattttttattcccgttttattgtctttattttcataggaataaaaaatcagcaccaaaaaatttacaacaactcacttactatcccaactaattgagttaaatcctcttgaatctcactgcatattcttaaattattcaattaatatataaggttaaattagttttttgttcctctaatttattatttaggttcgatttgatcatctaattttgttattcaatttggttctctaatttacactactacaaaaatgatcttctacgacattgattttacaatggttctacaaaaatcaatatcataagtaaagcggtaacatttttataaataactgcaacttttaaagacagttttatcaaaacaatctttgaaaacgcattacaacatcggtttcttcaagaaccaatgtagaatgcaagaatacaatgtcactgcattttctcactcatccttatttttatcttcaattattttgtcatctctctctccctcctcccctaccctacccctacatccacgaccttgacatctgcaacatcaaggtctccacctcattctcattcatcaccacactcacctcccatttccctccctcaaacgcacaatttcaagaacccaacggtgcaaccctatttagtccactcctccaattccttcacaacaccaactcctccttcttcctcaacctctacccttacaatctttatcacctcaaccccaagcttcctctcggaattaagctatttcaagaacatttgtttaacttccatgatgacttcaccaccgggttcggtactttaacctcttcaatgtcatggtcaacgctgtcatttttcctctctttagtttccatttaatcgaagtctctcattgtggtttccaattagcgtcaaatcagcttctttctccagtttggctcgatgcaatggagtagtacagccaatccagtaaaggttcacggtctaatccatcaccagaatggcccaggcccaaagcccaaaccgggctcgaaggtgtctaattaatctatttagctattgtgtttttggtgtttgtgatttaagggtttttttggggggggtgtatagcgggttcaatcttgattgtggaaaatccagagcctacatagaaattgggaataggtggtgctagggaggaatcatattcgtaacacctcaataaggttgattgcacttattatttgaagattggcatttgtggcttcagttcctgttgtcggttcaaccaacctcgtgatcgtgccgtggtaactattcttcttcttgttttaaagggtttccatgatgtcattgtgtacttttatgttcacaatttcgtctgatcttgctgaaaatcgcgatgtttttcatgatttcactaagattaagatgtttgcattgtgcactatgatttggtgttttgtaatttttttatgttaatgtgttgtttaggttgttgtagctaagaggacaataggggtgtatccgaaacgagtaggctagcctatgtgtcaggtgttgtttatggttctgttgaatgattcagtttggtggttcacactgtaattcattgctttttttgtgaaataatgtcgttgaggatggatggagtgtggttatgttttttgtttttgaagttcatgactatatttgctaatggttaaaatgtagtattacacgaggacaagaacatgcaaatttggttcatcttgcaagtaccaccgccccaggcagataggagacgttgttgctactcctgtgtcacttatggatatccattgtgatcggtctgtgtcacttttttgaatttattacttgcataaggctaagtgtgttttgggaatgttcagtttttttctgattgtggaaagattttgatctgaatttgaatgtttataaatgataatgataacagggtgagaaggattgttcctattatgtgaaaatactcacttacttactctctctcacacacagtcacactcaatctgtctctctttcagtaagagaaagaaatagaaacatttctcttttttatttctttctcttacgaagtatgaatagatttgtggtatgatcacatggcaagaggatttactctttgtattttttttctagagtttgatctatgtatgtgtatatggcaagacgattttcttcttatctgttgggattaaataagacgacttatgagttgtcaggagttggaaatgagggtaacgatctaagtgctattaaagaacctacatttggttggatgactgacttactttttgtggttttctttgttggtctctttgtcttcattccactcaggagggtatactatacatatccttttttttctttgttttgttttggatgtatatgttgcacatctttctatgacttgtaatattggatgcatatatgtagaactttgtaacaactctgttgaattcttcaaagggaagtgcctctatatataatatttttctttttctgtaatataaatcatgattatttactttttttgcaaatggtcgttggaaagccataagtgtcatctgctagtgtaaatttaacaccaaagacaacaatagtttggcctgtatctaaagcaaaaaatgtaccaaattggcaaagcaattaggggaggcacttgtagagcatttaactagttatgtcattgtcataattatatggtttaaactttaaatgcattttcatccttattttattttatttttttatgttgaggagggctaagccccaagaaaaataaggctagataggaacagatctaggagacaagagccccatagcatcctcaataggaggagctgacatggagcgagggtgatcgaaaataacatgatccatgggcttagatgagcatcatttgccatccaatcaacattttcatccctataattcatatcaattttggtttaaatgtttcatgtttggtccatatagtttcattttgtttgtttaggttttttctctatagtttcattctctttaagtttaagctcctatagttacatgctggtttgtttttggtccctataacttactagacattggttttgatggttgtctcttgaagggtacatgtgatgctataccattgttaggagggtccctaacctaaactaaataaaagtatatggatcaaaaaccaaatttttagaatatgagaactaaaaccataattgagataaattataggaataaaaatgtattaaaatgtaatttcctttttgtcattcattatatttagacttacttttggaattggaattacaataattatagggtaataaatccagtatattggttcttcctcctacttttagggtttccaaattttaatattttgtatgtggttgtttactttaacgatatgaattctatatgtctttgatttgttttatgagtatagtttttatgtcaagctcaatacttttctttaactatgctggaaaatggatgaattacgcttacactctttaattttgtgttaatttttaaaaatacaactttctaagatgattttttacaaatcgtcttcaaattctcaattttttttcattttttattaaaaaaaacattttgatatgatttctatgaaaatcgatgtagaatccaagtatctaagtcggttcaaaaaccgttgtggaaagtgttaatatttcatgatgacggcttcaaagacggttcaaaattgtcgtgaaaatggtgttttaaccgtctttgaaagctttttttgtagttgtgttataaaactgattcaatttggtctttagtttttcttattctatttagtcctctgatttttaaaactgaatcattttttgggacatatacattttgtggtgatttaaaactacttagtaacgattttgaatagtcacaaagtgtgatttcttacaatttagactgaatgatcaaattgaataaacttaaacgatttaaggaccaaattgaaacctaaaaaaaattagatgaccaaattgaaacctgaaaaaattagaggactaaattgaataaaaaaacaaattaaagggctaaaaaccaatttaacctatatttaattcaaaacttaattgtattttttgtttctttagtttttactatatatgattttattttctcaacttttttagttaataggtatttttattttgaaaaattaaaagaatttggacttgtaattgttggcaatttcttttataattctcaaattattataatttccaaccaaatgaagttttatgataatggatttgaaatattaaatattaatttttaaaattttaggaagttagaaatttagtgaaattttgatcaaatttnnnnnnnnnnnnnnnnnnnnnnnnnnnnnnnnnnnnnnnnnnnnnnnnnnnnnnnnnnnnnnnnnnnnnnnnnnnnnnnnnnnnnnnnnnnnnnnnnnnnnnnnnnnnnnnnnnnnnnnnnnnnnnnnnnnnnnnnnnnnnnnnnnnnnnnnnnnnnnnnnnnnnnnnnnnnnnnnnnnnnnnnnnnnnnnnnnnnnnnnnnnnnnnnnnnnnnnnnnnnnnnnnnnnnnnnnnnnnncttaattgtattttttgtttctttagtttttactatatatgattttattttctcaactttttttagttaataggtatttttattttgaaaaattaaaagaatttggacttgtaattgctgtcaatttcttttataattctcaaattactataatttccaaccaaatgaagttttatgataatggattgaaatattaaatattaatttttaaaattttagaaagttagaaatttagtgaaattttgatcaaatttaaaggattttgaagagagaaaatatgatattattttttactttagatggaatttaatgatctggttagttttaagtaaaagaaattaaaacaatttaattgattcaatttgtaaaaaaatgtataaaatgataatttaaaattttaaataaagcaaatttcaaactaaaactgtaatcaaacataaattaaaacaaaagctaatattacactcataacttacaaattatatgttaagaacttaatcttcttatgtcaaaattccaaacttgactccttatctcttcaagttcactggttgaagaacgtcgctaattattgtttacaacattttcatcttaatttgtaattagattttaaataacactttttgtttaattataatagtgtatgaaacagatttaaggaagggtatttttttaaatgcacgaacgtgaaaaaaggtatagtgtagcatcatacctaaatggccaaataaaagtatctattaattatcaaccattgagataataaaaaaccttggtcttttctttttcatttttttttacaaacttttcttttcatttaagctccaagatctgaattatacaatcacatgcaaaatgcagagaactaagactattttttgatatcaaacaaaatttaatgataataaagaagatggaggtgtagcctaaagctccaaaaaatcaattaaaacaaaaaactgatatccagagttttgcagattttgttgttataattaaatggaaatcatgaacgtgatatgaaagtatgaaacaaagtttaatgataataataaagatggaggtgtagccaaaaaccaattaaaacagaaaactgacatccaggtttgcatattttgttgttataattaaatttgactagagagagagagagagagagctaccattagctgtcaccgtgattcacatgcaaacatgcatataggatgggcatgtgattagaaacttgtccttggttactagcaattatattctgtgactaattagcgggtatgctcgtacaaaataattagaataaacatttcactaatctaggaacattgtttcgctttgtttcttattaacaattactaatttatctaacattattgctgatgatcattgtcacgacactaaaaagttcaaaccaactggatgaggcctttacgagttagtaatcctgtacttgtgttttcaaaataagttgcacgttggtatgtgtgtgtgtgtatatagtacattaatatatatacttcgcatacttcgcaaattggataaggcatacatataatttttttaattataagaaaattaaaaagttatattaaatatgaaaaagtgttggataagatatatatgttgatcaatcatattgaagactaaagagtgagacgtaaagtgataaaggaagacgaattgattaaaatttgtggggcatatgatgcttttttttttctttctctcagccgcccagattcttttaaagggtaaccgtccactgttcctttcgcccaacctcaaaaaatgtggttgtgatcttgtacaggttaataagcattcctatttgcgattgacacaccttgatctattacatccataaatgtagaaatcaaacaaatataatgaagttcggtttcgattcttccatagggaaataatgaagaattaataagataataaactagaaaaatgacattacagtattacgtaccatttatatagataaagttaaatatactatggttttatataaacaacacgcacatgtttcccatctttattttatttaatcttatgttgttctaacttccaaaaatgaaaattgttatatattatttggttctcaagtgcagggccagggtatcggactttttgtatcatcatcaacttcacaacgtaagtagttgactagagtttgatataattgattattatcttttgaagctctaattgcaagattataataagaagggcgttggtgaaatattatatgatatatgtgttcttaattagcggttgattactaagttcaatttgcatatataggaagacaacacgcgaatgataattttgcaattgtcaatcaaagatttttttctgacaagagaaaagacagaagctagggtggcactttggcagtaacaaagccaagaatgattttaacatatgtaaaaggaatccacaagatagaaaggccaattggggaaattaactaaagtcaacttgtcatcagctttatgcggtatgctgtatacatcaactttataagtcaggaaaccctgtttgattatgacaattgaactcgtagattaattagtataagattattttaatttaattaaagaaatttaaaatttgagataaatatataattatattaaatatttaaaaaaaattatctttgatgtaaaaaaatcatcatacatttgagctattaaaaaaaaaacttgtaattatggtttttctaacctagtgcatatttatatgcatgaatttcagaatagggacacatattatacatttgtcgtttgttttagataaaataaaactactttgcactaggcgagtaatattactaagaaatgcccaataagcatcaataattgtctttgccatggcctattaaatgaagaatcccaacgtgaacctaaagagagaattatgaatgtgagggatcagaggcaaagagttttaatggaccccaatgacaccaaaagagaagctttatatagagctccacttctcagttggatgtaactacattaaacgttgtagaaaacatatatgattcaattggtattgacattaaataattggtcctgtctctcaagcaagtgtcgcaattttattttattttttttggcagttgaccttctcatgcaagtccaatgacgaaggaactggaagtagtactactaaagtgaatgtgagagttagtgcatttactagttataattgaactcccactaagagcaagaaatgatgaggcgaacacagaagaccacatacataacatttgtgcaaaagcttctacatgttttttcttcatctgtcatggatattttcactgatttttttttctctaaaaggatgttgtttagaccaagatcttctccattttttcccactcagtttctttcatagaaatcaaagacaacgatcagaagattttcgagtacaactactcagacacactgctctaagtataacttttgtttgagaaacacactacatctacatttcaaactgatcatatacgtagaagcatatgcattaccaacaatattttagttgcatagaacataatatcactggtacaaaaaatactttttaaataaaaaaaattacgtatatgatgaaatgacatttttgtgaaattggatgaacattttacatcatcaattgctatagaaccaatctaaaaaatactttctggattggttacattaagaacaggagtagaatgtactttttaaatcacttttctatcgatcaatctagaatgtggatgccatttttgcaaactttgaaattcctaacaaagttttatagatccattgtacaaagaattgatcaagaaaatactttctagattggtttttcctatagccaatctaaaacattgacatcctttgcaaacttataaagctacttataagattttctagattaaatgtataaataagcaatctaaaaacacctttgtgcattaattcctcttacaatcgatctaaaatattgacatcttttacaacttttaaattttctaacaatacttttttagatagttttactaagaaccaatctagctacaaagctttttctagaccgtttcttagtacaattgttatataaaatccataagattaatactaatgttttcatattttcattctcactccattttcaaatcctcatttcctacttcaacaaatccaagatgcatcaaggaaagtattttcaaaccgatgaacacctaaatggcattaattttcctcttacataattatgtcattatgtgaatataaacaaagtaatactacaatatccaaagtcgtattcaaattactaatatgttactagttcaattggaactaaattctgtctccttaaataagatgatagatttgagtcttctgaataagaaaaatgtgattgagataaaagatctcactaaaattcatcaattaattttttttataaaaattaattatcactaaaagttatattaatattatgttgacccaaaaaaaagtcatatccaattataaaatttcttgaacaattattcaaaactaaatttataataaccatttaacaggtaaaacctacctattaaggatgattattattatttttttgaatttgatatcattatattaattgtcatccctagcataaacacaactataacacttaaaacaagataatagaatgacagaattcaacgtatggcatttcaattaaaatttgtgtggactatcactgtacatggtacaagttaattggccagagcaagtagcaactcttgcctatgttaagacgattgaatgaatggatgaaaaaacaatatttgcaaagaattcgtgagcggcaggattcgaacctgcgcgggcagagcccacatgatttctagtcatgcccgataaccactccggcacgcccacacttgtttgctagaattaacatttgttatagtttctttaatccatagttaaaataggtaaatcaaaatgcaatagatttacacaacacaaataaagtatatctcataccatcatatccactgaagctaacaataacatccgaattcaattattcattaccccacgttgttgaaactgaccaaccttgtccttcacaagcttgagttgctcagctatcacctaattttaagagcatttgttcacgccataatgcaggagaaaaatgattctattaccagaaaatatgtctcacctaacattaaaatttgataattttccatatacattcatcttgtgccaaatattgtagtaggtgatcctttttctctaattaattagtactatgcaactacaagcgttaaccatataattagtatcaatagccagtggaccagttagagattccggtatcgatctatacacgatcccacagatataccctgaaagaaaagttatgggagcaataaagagtcttgcaattcgtactatactatacatttggttgaaacatcttttttatagaaaggctaaatgaatctgtcacgatgcactacagtttgcccaataaagctcatcatgttctcttgttttatataatgtgaatgtcaatcggttaattgaataattggaatgatcagtttttacttaaggcttaattggcccacttaaatccttgaattcctatatgtaatcatggtttagcctcttcactttcttaaagcaatatttatagcctaaacagctaaatgtcataccaataagaagtttgatttttttcataagattttggattcaaatcatagatgaaaaaaatataattagaatgagagattttattataagtgatctaattgattctttgaccaagattcattattaataaatttgataaatattttatatcaatgttctaacaatccgaagaaagctaacttatttcacatgtggaactaaatcatcacaagattctagagagattccttgtcaagaaagaggaacaatgtagaaggcagcgtctaggaaacagaaccacatttcgtaaaagtcactgctctcttcagaagataacacgcaaatgaaggacgtgctgcttcttttttctatccttcattgtagttttgggcctcatatattggccgaaaagctgttgtagtaaagcgtgttgggtgaaatgcggggaattgtggtcctcataattaatgtcaaccgatgcctctaagagatagctgctaaaaaatgaaagtgttgaagaatcttgcttgtgtgctacataacaatgaatataatgctggtagagatttgaagcatatattatcgatcaatattcatgcatgcttaacctaaggtccaaccacttgttagcatcatgcgtggtctgcccaaaaccattggttttttgttattggatttagcaagaaaaaaccaggtgggataatgtctatctagttaaaagtgaatcttctgaccgtggttgtccatttcatggtctttgtggatcttgagctaaattaagctgggtggattagggtcacggcatttaaatcatgcactttcttatttgaatcttgcactttctatataaatttgtatttcagaatgaatgttttaaaatacaatagaagatacaaaattaaataataaaagtgtagaaaacaaatgccttaggtcacctcttactggactggactcaaactagtaatatggagtatgaagtgtgaaattttagattttggaccatcttagatactcccaaaagtttccttccacctcagtaaaggggtgtgctaaaaaattaaacctaatcaaatcaaatttaaaaaactgaatcgtttgaggaaaaaatcaatcgcattattttttgtgaacagtttggtagtttttataaacggtttaattttttgaaaaaaccaaccatagatgtgtataaaacagttaattgaatttaactaaacccaaaaaggaaaaacaaacccttttgaaaacaaaagacgaatcaaactattttataaaaatggttcgttttggattaggttcggtttagttttctgaagaacagtttaaattgagtctaaagtttaaatttcttattctgtagtcgcaagtccgtttatagaagttgagaacatctaacaaaagtaacaagatttgatcctcacacatactcgctgttccaatattttttttcctcctttatctcgttcgtttctttggtctcactgggagccacatcaccagacacacaatgtgacaatgggtcctgaaccttactgaaatgggaaaaaatggcatgcgatttttttattttttatttttgttacagttataaatctcatattacttgtctttaagttctatatataaaaaaatacgatttataaaaagatcccttataccctaatcaaaataattttcataagtaatttgagtttgacgtaacctttttcatctttaaagaaaaaacagaaaataataatcaatatatagttaagaagttaaaaaataactttgttttataaatacaatatttaatattaccaatacatttttttgtagtgaatttacaggtaaaattttttattaacttcttaactagtattcttaaaacatttattagtaaaacactggaatttttcctttaaaaagtaaagtttaaattgttaaataaattaaatgtctttctgtcaaaaaataaattgatggccttaaattaaaccgtaaattacagaaattttccttgagatttgtttatttatacattttttttctcttttttaaaatcattacattggtactccttgttttaatggtgttaagttaccgtttaaaaattaaaagatatatacattaaattttaattcatttttaaaaaatccaaaattgtccccgacttttaagtgacctaaatagagagaaatttttgtctcatgttaatgtttcagcctaccaagtcatcttttatgtgcaatcaaagatggagtcacgcgttgcttgttttacgtcgtaaccttgtcttcctgttcgcatccacggtggtggtttctcctccacattcctcttcgcggcttttgtacgtaagaggggtatttttttttagaaattacggattaggggtgggttttaaaaaatttacgaaaaaggggtaagtcgtaaaattatttacgacttcttcttagaagtcgtaaataattttacgacttattttttttaatttaaatacgctaaaatcgtaaacatttttacgacttctgaataattataatttcaaatttacgacttaaaagtcgtaaaacaaaatcggaccaaataatacgacttttgaattaattttacataagtcgtatattattttacgatttcagttatacgctaattatttttttattttaatttatatttttcaaaagtcgtataattacnnnnnnnnnnnnnnnnnnnnnnnnnnnnnnnnnnnnnnnnnnnnnnnnnnnnnnnnnnnnnnnnnnnnnnnnnnnnnnnnnnnnnnnnnnnnnnnnnnnnnnnnnnnnnnnnnnnnnnnnnnnnnnnnnnnnnnnnnnnnnnnnnnnnnnnnnnnnnnnnnnnnnnnnnnnnnnnnnnnnnnnnnnnnnnnnnnnnnnnnnnnnnnnnnnnnnnnnnnnnnnnnnnnnnnnnnnnnnnnnnnnnnnnnnnnnnnnnnnnnnnnnnnnnnnnnnnnnnnnnnnnnnnnnnnnnnnnnnnnnnnnnnnnnnnnnnnnnnnnnnnnnnnnnnnnnnnnnnnnnnnnnnnnnnnnnnnnnnnnnnnnnnnnnnnnnnnnnnnnnnnnnnnnnnnnnnnnnnnnnnnnnnnnnnnnnnnnnnnnnnnnnnnnnnnnnnnnnnnnnnnnnnnnnnnnnnnnnnnnnnnnnnnnnnnnnnnnnnnnnnnnnnnnnnnnnnnnnnnnnnnnnnnnnnnnnnnnnnnnnnnnnnnnnnnnnnnnnnnnnnnnnnnnnnnnnnnnnnnnnnnnnnnnnnnnnnnnnnnnnnnnnnnnnnnnnnnnnnnnnnnnnnnnnnnnnnnnnnnnnnnnnnnnnnnnnnnnnnnnnnnnnnnnnnnnnnnnnnnnnnnnnnnnnnnnnnnnnnnnnnnnnnnnnnnnnnnnnnnnnnnnnnnnnnnnnnnnnnnnnnnnnnnnnnnnnnnnnnnnnnnnnnnnnnnnnnnnnnnnnnnnnnnnnnnnnnnnnnnnnnnnnnnnnnnnnnnnnnnnnnnnnnnnnnnnnnnnnnnnnnnnnnnnnnnnnnnnnnnnnnnnnnnnnnnnnnnnnnnnnnnnnnnnnnnnnnnnnnnnnnnnnnnnnnnnnnnnnnnnnnnnnnnnnnnnnnnnnnnnnnnnnnnnnnnnnnnnnnnnnnnnnnnnnnnnnnnnnnnnnnnnnnnnnnnnnnnnnnnnnnnnnnnnnnnnnnnnnnnnnnnnnnnnnnnnnnnnnnnnnnnnnnnnnnnnnnnnnnnnnnnnnnnnnnnnnnnnnnnnnnnnnnnnnnnnnnnnnnnnnnnnnnnnnnnnnnnnnnnnnnnnnnnnnnnnnnnnnnnnnnnnnnnnnnnnnnnnnnnnnnnnnnnnnnnnnnnnnnnnnnnnnnnnnnnnnnnnnnnnnnnnnnnnnnnnnnnnnnnnnnnnnnnnnnnnnnnnnnnnnnnnnnnnnnnnnnnnnnnnnnnnnnnnnnnnnnnnnnnnnnnnnnnnnnnnnnnnnnnnnnnnnnnnnnnnnnnnnnnnnnnnnnnnnnnnnnnnnnnnnnnnnnnnnnnnnnnnnnnnnnnnnnnnnnnnnnnnnnnnnnnnnnnnnnnnnnnnnnnnnnnnnnnnnnnnnnnnnnnnnnnnnnnnnnnnnnnnnnnnnnnnnnnnnnnnnnnnnnnnnnnnnnnnnnnnnnnnnnnnnnnnnnnnnnnnnnnnnnnnnnnnnnnnnnnnnnnnnnnnnnnnnnnnnnnnnnnnnnnnnnnnnnnnnnnnnnnnnnnnnnnnnnnnnnnnnnnnnnnnnnnnnnnnnnnnnnnnnnnnnnnnnnnnnnnnnnnnnnnnnnnnnnnnnnnnnnnnnnnnnnnnnnnnnnnnnnnnnnnnnnnnnnnnnnnnnnnnnnnnnnnnnnnnnnnnnnnnnnnnnnnnnnnnnnnnnnnnnnnnnnnnnnnnnnnnnnnnnnnnnnnnnnnnnnnnnnnnnnnnnnnnnnnnnnnnnnnnnnnnnnnnnnnnnnnnnnnnnnnnnnnnnnnnnnnnnnnnnnnnnnnnnnnnnnnnnnnnnnnnnnnnnnnnnnnnnnnnnnnnnnnnnnnnnnnnnnnnnnnnnnnnnnnnnnnnnnnnnnnnnnnnnnnnnnnnnnnnnnnnnnnnnnnnnnnnnnnnnnnnnnnnnnnnnnnnnnnnnnnnnnnnnnnnnnnnnnnnnnnnnnnnnnnnnnnnnnnnnnnnnnnnnnnnnnnnnnnnnnnnnnnnnnnnnnnnnnnnnnnnnnnnnnnnnnnnnnnnnnnnnnnnnnnnnnnnnnnnnnnnnnnnnnnnnnnnnnnnnnnnnnnnnnnnnnnnnnnnnnnnnnnnnnnnnnnnnnnnnnnnnnnnnnnnnnnnnnnnnnnnnnnnnnnnnnnnnnnnnnnnnnnnnnnnnnnnnnnnnnnnnnnnnnnnnnnnnnnnnnnnnnnnnnnnnnnnnnnnnnnnnnnnnnnnnnnnnnnnnnnnnnnnnnnnnnnnnnnnnnnnnnnnnnnnnnnnnnnnnnnnnnnnnnnnnnnnnnnnnnnnnnnnnnnnnnnnnaaaaattaataaagaagtcgtatagggttaaacgacttccaaaaaaaataaaataaaaaaaaacaaaaggagtcgtatccatttatacgacttttagaaaaaaattcttaaaataaaaaagaattaacatataattgaagtcggaaaatattatacgaattatgtaaaatttatttaaaagtcgtgttatttggtccgattttattttacgactcttaagtcgtaaatttaaaattttatctattcagaagtcgtacatacatttacgattttagaaatataaaattaaaaatttgaagtcgtaaaattatttacgacttcttcttagaagtcgtaaataattttacgacttacccctttttagtaaattttttaaaacctacccctaaccggtaatttctaaaaaaaaatatcccttttacgtagaaaagcccctcttcgcctccatgatggtgttagatgcgttcccgtttcccgcatgtttctcctccgcctcctattctcctacgtagtggtgctaggcacattctcattcgctacacattaaaagctattatatatgtatccttgaggttttcaaaatgttacaatgtactacccgatattttaaaaatgttacacatgcagtggcggatctaggactaggaccctggatcagtgagggtaatttattttaaaaaataaaaattgataaattatcattatcatacacatgaagataaatactatcctctttgtaaatataccctttgtatcttatctcgatcattaggatgataagctgaaattttaattcgttttcctggatctgatggcaagttatctatattaatttcaatttgttgttgtcaaagatttgattcacaagattccgataattgttgctcatttgatagcaattttctcttcaaaaaatttttcatgatctattcaagatttaaaaaaaaataataatcatgatcagagagaataaaatataaaaagaataataatagtaagattaataatttgtaatttgaaatatttgtaatagcaaaaaaaaaaatctggaacccccaccttttcacgcaccttaatgagtggaagatgtaacaccccaaataattatctgtatattaattccgtagttagtatttcaaactcgttagtaataatgcatgtttaaaggaaactgtaggagggaatgagaaatgtagacagaataaatagtgataacacatttctataaaataagaattacaaaaatacccttggggtcataattacataaatgcccctgcacaattttggaaatgaccaaaatgcccttagagcaaaaatgaccattttgcccttaggcatttaaggaaatgaccaatgggtcctagatattttagtaaaatatcttagaatagaatgacctaattacccttggacaattagaaaaattaccattacgccctagaagggtaaaattaccaaaatacccctgtgatcagagaatggttagatgacccagaaaattttataggacctataaaatggataaaatatctttagatgagacaatattaagttagtatatgatgaggaattataaaatgaaatttctaggaatttttagaaaaagtttgagaaaaattcaattttaaggccattatggacattagaaaattgtaggaaaataattgtcatgatctttggagttttctcttaattataggataaatggattccttaaatgagttagatttgtaatttaaacaaaagaaggccacaaggaccaataggaaatgagataaaagccatttagggtaaatgaagcttaaagtgccttaaactacaagtttttacataatatgaaataagacaacattttctacaaaattactaaaactattaacttggattaagaggaaaaatatagaagtttagacacttggtaaaatgcaaaattaataaccaataggattaagaattgggtaattacatgataatgacttaaagtaaggcaaatgaacatgtttcctagccttccttagcctctcacggttttggccaagcaaaatcaagccccacatggtctagcttcaacgtggacaagagaggaatggagaggagtgtagagttttcaagaataaggccacttggaaggataagatgaattagccaataagaagttaccaagaagaaagttagccttaaatgctttcaagatatttttggtaatcaaaatcaaatctaatcttcctttccacatgtaaaatggctaagggagaagtaaaaagactaggtggagaatgaagccacttggaaagataagaaatcaaagccaataagattaaaacacaaggaaagtaagccataattaaccttgatttccatgtagtaaaaaactaatatttaccacctataaaaggcttggattttggaatttttggtcacccaaaaagagaaaaaaccgtgcaagcccttcacctaagccatctcccatcattttccactttcacttacacaaaaagcaaaagactaggaccacaccttagggacttcacgtggaaagcaagaaggaagggaaaagctttcaagaatccaagaaaaggcataggtatgggaagtttatggtttaacctagttaaatattcatttgcttaagtttcttaaattattaactaaccaaaatcaagcttgtgtagttgaaatttggtgggaaagcaaaaagactacaagatggtgacataaaaagtttaggactttggtgatataattctagttaacaaatgattagtgaaggactaacctaatataatccaagataagaaggaccaaggacttgtaatttgatgtaatttgattaagggactcaaggtaataagttagaaggctaactaattaaaggaacttttatactaattttcctatgaacatattttactaaagtaagtacactagtcattcatgannnnnnnnnnnnnnnnnnnnnnnnnnnnnnnnnnnnnnnnnnnnnnnnnnnnnnnnnnnnnnnnnnnnnnnnnnnnnnnnnnnnnnnnnnnnnnnnnnnnnnnnnnnnnnnnnnnnnnnnnnnnnnnnnnnnnnnnnnnnnnnnnnnnnnnnnnnnnnnnnnnnnnnnngtcatttagaaattttatgtgatatgtatatttcatttatgtggttgagtttattatttgtaatttattgagacgattaagcttattaattgaagaaagttgtatatgttgatgatttggaaaagttgtatgtgttgaaaattaaacatgatttataagttgttgttaccctgcggtgatattattgtggtagtactggagttgtcgttactctgtgatgaagttgttaaacctcaaaggaggtatgtcatatagctgaattatgacgagcgttcagacatatggtggctgaacttggggataagatcagtggggaaagcacctacccatgatgatcacatgctgtgtaggtgtgagtcctattgcaacacagacctatcctgactcgatcgctctgattccgtgttgagctattttgaccatggccataagttgaaaagttgtgaagttgaacaccctgggtttaattaaaatttcgtgtggcttatatagatgtgcatgtctatgtattttttatttaaatgctttatttaattatggttaacataaacttacccatttttgtgtctgtggtttgacacctgtgatgacctcaaaatttattttgagtgagcaaatgaacagtaggatttggatgagctaagaagatgtgctggaaaatttataatgttttgttgttttgatgtgtatttggaagactctggactatttgtattatgactggatatgtatttttggactgtattatgataactaaacgcgtatgtatgtttaatatttaccgacgttagataaagctcactacgtttcatcatttgtttttaaaaaaattaaatgaactttaattcaattatgggttattactacattttcgaaaattaaaagaaatgaaaaaggaagaaaaaattctatgcgtaaaaataaataagtaaataagtagaaataaattaggcgtaacagaagagaggaaagagttgtgttttgtgagtggagaagggagagagcaaagagtggaaggctgagtggaagagtgaaggtttcgttagtgctagagcatggaaaagaaatagtagagaagggaacacgtgaggtttgacaatttggaaagcttatggaatggataaaacttgccccttgaacgcgtgtgagttttaaaaaatatggaaacaattttacttgatttacgaaaatattgcttggttgttactaaaatgtgaaattcagttaattattttttatcaatttcaaatcttcaccagattattcgctctttcaaattttaattctagcataacttagttgcatatcttttattttatattgttacgcatttagttttatttattttaatttatatttatgaaaaataaaaaaatgttaatttttattaaaaatataaatatgtagattttttttgagtttcttgtaattttttgtatttgagcaaaatattgaataaatttcttaaaagtgacatgacagtgtgggttcaaatatataaaattaggggggacaaaatatagaaatattagataaatatatgtaactttttaaaatgagggggtgcatatgcccatcctcatttatatatacatccagccctgtacacatgtaccccttgtcttttacaaataatacatgtgcaccctctcacttttacaaaaattacacatgatacccattttcactttcacttgctggaatgtaaaaaaatgtggtagaacaattaaacatcctcaaaaaacgaaaaagaaaatcaataccatgaacattaacccacaaaaacaaactagcattagtttcaccacactcaacaacaacagtggctcgtaaaaattcaacaacagtgtgtcaaagataagggttttaaacgaatgaaggagatgaggacaagtttgaaattaaatttttaataaaagtcatgtgtctaccacatgatctaaaaaataaacgaaattaacatctttaatgatggagggagtgcaagtgtaacgagatcacaaaagttagggcattttgtgtaatataaaaaaagaaggggagacatgtgtaaatagtgcagacatcagggaagattgttgtaatttgctctaaattagatccccattaccaaacattttctattcatgtgcctaaatcttcgtattggttcaagtaatagtgagtttgatcttcttaaataaggtctctggttagtatgaaggaaaaaaaatggtgtaagtataccaaaccacctatggaggcatatggctcgacctatttaaggcttagcctagcatagctcatttagcaaaaaagttaagttccaacctttttaaaaaacctatttatttaaataggtcaggtcacagaccttaaggaaagtctattgagcatgaaaaatcggcccgtttagtaataatattgtaaaataaaatattattattaatatgatatataatataattattttatttaaattacaaattatttttgtagtttaacaatttggatcattttaattaatgtttgaaataggttaattcatataagcatagatgagtagtagaaatattgactcttttctttttgtgagacataaaagactttattagcatgtgatatgtaatatttgtaagtaaaatttgtttatatcttatgatttaaaattatcttattatttttaatataaaaaattactttgtttaaaaaataaaaattttcatatttttttaatatgaaataaatttttaaatggattacataaaggtcggactgaactctaaaaataaggtcaaactcaactctaaaaataagttcataataaataattatgtaacataatcaattttaagttataaaaatataaaataaatcaaatcaaacttagaaattccacccttataccccacaaaaaataaatagcaaattttttaacaaagattaatcataaattctctaccataatataataacaaaaatatctttcataccttctctctgttcatgcgcctaaatctccgtcctcaatcaatattatcatgcccaatcccatactatcgcttgccaatgttttgtatggcaaccgcgcccatgataatgaacgagtttaatagatagtatatattaattaaaaaataaatatattattgataaattataaatctatttttggtatgtatatgttttttcttttattgaactaatacaatactcgcgagtatacacggacaatatcgttatttatacattttttatatcaattgacaaatgatatatatgataaataagcaattaattaaaactatatatttaagagaaagatatattattgattgactttttaaaaagtaaaatattgctagtaattgtctttttaaatgaatgtatataacacaactaggattatcataaactatatagccagaatgacaaagtgacaatattaagaaagcccagagacaactcctatattactttcattacagtattttttaataaattcctggataacaagtctaaaggagtttaataaaatcttctattttaaatataagtatgtctattattataaattagcaaaacaacataattgtatttggatgtcctaatacagttattacaaacctttttcaaaagaaatttactaaccaaattgacaaaagttgatcaatgtataatctaatgcatgtacaatcgggttgaatttgttgtggtaaagtggtacttagtgacaaattatattaacaatttaatgttttatgttataaaaaaattgaatattgactgattagtgttagcaaaaatgtatatttctaaaaatgcttcttatcaacagaatttgtaatataatataataattgacattatccttctttagatttttatatcagnnnnnnnnnnnnnnnnnnnnnnnnnnnnnnnnnnnnnnnnnnnnnnnnnnnnnnnnnnnnnnnnnnnnnnnnnnnnnnnnnnnnnnnnnnnnnnnnnnnnnnnnnnnnnnnnnnnnnnnnnnnnnnnnnnnnnnnnnnnnnnnnnnnnnnnnnnnnnnnnnnnnnnnnnnnnnnnnnnnnnnnnnnnnnnnnnnnnnnnnnnnnnnnnnnnnnnnnnnnnnnnnnnnnnnnnnnnnnnnnnnnnnnnnnnnnnnnnnnnnnnnnnnnnnnnnnnnnnnnnnnnnnnnnnnnnnnnnnnnnnnnnnnnnnnnnnnnnnnnnnnnnnnnnnnnnnnnnnnnnnnnnnnnnnnnnnnnnnnnnnnnnnnnnnnnnnnnnnnnnnnnnnnnnnnnnnnnnnnnnnnnnnnnnnnnnnnnnnnnnnnnnnnnnnnnnnnnnnnnnnnnnnnnnnnnnnnnnnnnnnnnnnnnnnnnnnnnnnnnnnnnnnnnnnnnnnnnnnnnnnnnnnnnnnnnnnnnnnnnnnnnnnnnnnnnnnnnnnnnnnnnnnnnnnnnnnnnnnnnnnnnnnnnnnnnnnnnnnnnnnnnnnnnnnnnnnnnnnnnnnnnnnnnnnnnnnnnnnnnnnnnnnnnnnnnnnnnnnnnnnnnnnnnnnnnnnnnnnnnnnnnnnnnnnnnnnnnnnnnnnnnnnnnnnnnnnnnnnnnnnnnnnnnnnnnnnnnnnnnnnnnnnnnnnnnnnnnnnnnnnnnnnnnnnnnnnnnnnnnnnnnnnnnnnnnnnnnnnnnnnnnnnnnnnnnnnnnnnnnnnnnnnnnnnnnnnnnnnnnnnnnnnnnnnnnnnnnnnnnnnnnnnnnnnnnnnnnnnnnnnnnnnnnnnnnnnnnnnnnnnnnnnnnnnnnnnnnnnnnnnnnnnnnnnnnnnnnnnnnnnnnnnnnnnnnnnnnnnnnnnnnnnnnnnnnnnnnnnnnnnnnnnnnnnnnnnnnnnnnnnnnnnnnnnnnnnnnnnnnnnnnnnnnnnnnnnnnnnnnnnnnnnnnnnnnnnnnnnnnnnnnnnnnnnnnnnnnnnnnnnnnnnnnnnnnnnnnnnnnnnnnnnnnnnnnnnnnnnnnnnnnnnnnnnnnnnnnnnnnnnnnnnnnnnnnnnnnnnnataaaataatttaaattaattaattttaattgtcctataacaatgaatgaaattattattttataataaagatattagctaaatgttattattttgttaaacataaaatatttaatattaaaaatgttaaaggatgaaataagaaatttaggatagaaaaaatacaaaaagaaataatataacataaaaataaataaagagaaagaaaaaacattttaagaaaaatgattaggataaataatatttggttatttattatataaagtaaaggtattctaattagttaatcgtgtattcgtacgaattgtatttattcctatatttttttctaatatgacttatgtatataattatttatttaaaaataaataatagaacatatgatacataaccaaataattaataaaactttctatatgagatggattaagaaaaggttacatacaatgatacacagcatatgtaatatgcttttctttttggaaaggtgttcaagtaagaataagtaggattctaaactcccatcacaggcaccaaaactaaaaatattttggaagttgttattcttatccccagttttgctattctcacccttaaattttagaaaacatcctaacactcttgccctttccctatttttgtacacccgcttccctttttcctgactcctcactctctagatttcttgcacgccactaacccctctatagcccccaccaccttctcttttttattttctttttaattcttagatttaacataatcgtgaatttgtcacgtataaatgcataaaggaatcataatttggttgcctccattttaaatcaaaacttaatacacaacaaaaattgtgattttgttatgtatttaggttaagatacataacaaaattgtgatttcgttgtatatttgggtttaaataaaaatggaattgtgatatatatatatatatataattgtgatatattttatccttttttaataataataaattaatcatgatgtaaattacttttttaattaaaatatgaattaatgatgagataagttatccttttaattgtaatcaaatcaaattaattatgaaataaattagtgttataactaatttgattactataaataaaagaaaatcacatttttttatacatgacaacttttatcataattagttcaattttaattaaaaatataatttatatgatgctattaaaaaagttaaattgtaacttcataaattgaattttaattttaaaaagataaccttttgtagaggaaaaaaagataacctatatcatcattaatttgattactttaaaaaatagtaaattatatcttcaatttattattttttttgtaaaaaattaacaaatgaaaatatattttcattatgtaagagaggtgcaaaaaataatacacaccaaaaatatatttgcactatatactttatacaacaaaatcatatttttgttgcagtgtaagaggtgaaaaaaatacatgacgaaaatatatttccgttgtataaaagtataatatgcaaatgtattctatcatgtatttacataataaaaatgtgtttacattgtataattttttcaatggaaacgtatttccattaaagggtattttgggattaaactttttaaaagcacaagacggtctcaatagcaattctttaatacccttctttctgcttttgaaggccttcttctaatgtgtaagcccaacgttagtagaatgttcctccaccaaaaccctaaaaaccctacctccttaaacccagtctctagaaccttccaccctcatccagaaacacctggggtcttaaaaaaacgtcacgctccttctcaaccctaaaatcagtattctttgtgtttttttgcagaaaagattaggagatggcgaagcgcttgattccctgcttcaatcgcattctcatcgagaaaatcgtccctccctccaaaaccagcgccggcattctcctccctgagaagacctcccaggttttagaaaacccaccgttatttttagttttatgtgaaattttgtttgtttgtttatctgtgtatcataaaattgtttccataaacttatccgttaaaggaagtttttgtgtgtggttgttgaaacagcttaattccggtaaggtgatagcggttggacctggatcacgtgacaaggcagggaacttgattccggtgtctgtgaaggaaggtgatcacgtgctcttgccggagtccggtggcacgcagatcaagctcgatgacaaagagtatggtttcaggatcgtgttttgtgtgtgaggaagatcattggattgaaattttactaattggtttctttgtttatttttttcttcttgtttgcaggttccatttgtttagggatgaggacattttgggtattctgcatgattgatgttgtgaatgtgatgcctcctaaaacatgcaaattgtgatggagttggaaaataatttgtgtcttagtttatgaatgcaacttgttacaaacatttgagggggatttatttttaagaatttttatcctgtttttgtattctgaaaatggcaatgggaacggtgcttcttactttgctcagttcttgttttagtctttgttgtttgttttgcaattttctttaatttagcgttacgagtttaaagctttgtcatgtcaaacgtttaattctatgttcttagactaacacttaaaattactctaaaatgtattagaattgatcaattttagttatgtgacttaaagcgatagtccctaaaaaatttaataggaaggtttaaaaatgacattccagtgaaggaaaatatgagtgtgttttatgagtgttcataacacatatagttagaataaaaatagatttattttgagtttaaaatactgtaaaaattaaataataggttgtatttatgacactgtagaaattaactttccaatataaattgaaatcactatccagtatctcttctaattattggcactgtgaaggttaaaacaaaatttgacaagtctaacatttgactttgctctttggttttcaaccataaacgtgtgaaggcctacacgccttctttttctctcaacatcttgcaaacaaaatatcatttttattttttaccaaaacatttcaattatatttatattatttatattttcagtgctagccaaacatattataatatttcacttaaaaaatttaattaatcattaaatattaaaataaattttttataaagattaaaatattcatttgtgtataatatggtatgtttaaaattaagttgataatatattaattaaatgaatatgtttatcgaggtagacacctagtagcacttatcgatgtctagatagcattagtaatatttattatttaatcaaatagaaaataatataacatttttttccatgatttatagctctaaattaactttaaattaactttagggtattatatttatgtcaaactcaagtaaattaataaatttagtcaataaatgaattaagaaaatttattttttattcattcaattattcaattattctattcaaggtcttaattttattatagatatcaaaattcattatcgaaagttgatagatttgatcttaatcagtcattaactctacaattatttaattatatttaatattcatttaactagtgctctaaaaattagatgtcttgaatcaaaatataacaaataacatgttaattactatgacaatctcaagtcaaacaaaaatttattattgtaattagaattaatatatattgaatctaatagatcttagacttacacaattattcccaccaaccagttagtatttataattttaggataaatttagcgcattacttaaatcttttattcattagggctagctacacatgatatggtattttgcattttgctctttaattagcaactgagctacgcagtgaaaagcatttctttacacggaaaaccactgtaggaaaggatgactgaatatgctttagatggcaaaatgagttgaaatgatgaagaatttgggggcagaagtaacatcaatacgtgacacgtaatgaagaatgctaagaaccgcgtgtagcaagttgaaaaatgaaacttgtcttcccttgtttgagacttgtgtgcataatcatcgcacaaacaataacaggtcgatggcctttctttaacttagctctcaaattaatcacaaagaacaaaaaacgagaaatatgagaaatacagaccagtggttttgtcataatcaattaatatgcattgatatcgttctatagaagatagacccaaattaaggaactgcagaataattgataactccaaaaccgaaatccatgaaaaaaactcccaatatacacctgaagacagcagaaaataaaacattagcatgacctttatgaacacattatgaaacaatccccttcttactttacctctccataaaaggagcaatggcatgatacttagatgctaaaggagtcttcactctcgttttgcaccatactgttgaaatctatcttttcaccatggacacattaatgcattttttttttttgatcggcacacattaatgcatttacacacacctccatgaattagcatacaaattaccagttttttcaatacataatctgatagtcatcctccagcctagcttaagatgctaaaagaaaatgaaacgaaacaaaatttctcttcaaaaaaatttaacagtgcccttgcaagttgcaacatacaccacacaggtaaaccccaaccataattttgttctttcagcatcaacatctaccaccaccaccaatcaataattcaatttgcaaaatgatatatcaatcatattaacaacgaacgaagctcaaccactaactcatcatcttcccaattcaatgaaacaaggccattatccaccaacgatatcaagtatttcaaatcaaaagcattttacacttaacaagtaagatatgccgataaaaaaatataattaaaaagcatttaacaccacctgttattctcttgcattagcatatatgatatatcataagaaaacaaggcaaatcgaaactatacttgctgatacaataatagtcaatcacagagaagacagattcaaaaagaaccggcaaccctaaaaaaaaactaaaaccctaaaccccaaaaaaaattatctttaattcttaaccagtttcacttgtactcgaaattgggcacaggaggcgcatcaaagctctctaaaaccttggtctcgcttcctccggtagccgccgccgcctcatccttcttcccatcgccgaaccaaccaccgaaccacgacgattgcgaggcagcgtccggcgccgaagcaaccggctggcccggtagcccgttaggcggaagaggctcgtcgataatcatcggcatcggctgctgcgcgctgaggaacttgttgagcatgatgccggcgccctcgatgagagctagaaggacgccaccgaaggcagcggagcgggcggcggcggggaggccctggcgcatggagaggaagccgccggtggctgcgccggcgaagatggagttccaggggtcctccttctggcggaggtagaccatggtgcagtcgaagctggagaagaggccgccccacacggcgaagcttccacccacgcgcggcgcgttgaggcgtaccgcttgcgacgcggcgacgacacgcgcgcccctcggcgcgttgtagaggcccttaaggaagtggaaggcggacccacccaccgcgcccatgccgaacgcgccgcctatgtcgtccaggatgcggtccggacatggttcccttgacgtctctggagttcccatctctctctcttctttgctttctcttttctcttctgttctacttctagggctttctctgatttggcatctatggcaccttattctaatatggttcatgtgtcatgggaagatattttttttttacatatgttgaatgatttttatcttaatttatatttatatttgagtttgattttattaagatttgattaatataaggaatgtaacatggttattttaatttgtagaaataacgtatcaattataattttaatattgtatataacaaaaataaaaatgttttgaaataatatggatccttattataatttataaggtcgaaatttaaaatgtaattggatccttcttggatatttattgtgacatgtatttgaaagtatcaactagataattcaattaatcatatcagtaatgtaattttctttatcttttgtgatccgcgaaacataatttaacaccttaagtaaatcatattaaaaagagaaaaatcaagagattgtacattatgagattatatggttgattatgacttaaatgaattaatgaattaattagtattatctatatctttaacaagatgtctttattttttggtagtctatatcacttaagaattttataattcagcgtgattgactttgagtagtttgagataagtgatattttggaaagttttgaaaaaaaaagtatgagtgtgaacaaaacacgctgaaaagttatgtgttggtttgtgaaaatattcattgatgttaaaagtagccaaatctgatttttaaagtctcaaaaagggttacctataatagattttgaccgatgaagggttctcatcaacaaagacggtgagtgaaaagtcattgtgtgaagtgtcatagtgtgtgactcgctgagaagtcaataaccaaggatgttacaaatgatattaaagaatacatgtttcttagtatagtgtggttcgaggacgaaccaagtgaaagttgattaacatgtaacacctcgagcgaattacactaaaaagagagagatcctaaaggttgtacaagtatgaaatttgtacatttaaggatcacctgaaggaattaattagactacttataccaacaagatgcatatactttttggtagctcgtcacttaagaaatcaacacttaagtgtgtttggctttaggggtgttcaaatccaaatcaatccaaaataaaaatcgaaaaacactaaaaaaattgaaaattgaaccaaacctattctttttgaatttctttggatgattgttttctcaaaccgattggtttagtttcatttgtagtttgtgtttttgaaatcgatctaaattacaccaaactgaaacacttatattaacacttatattattttagcgttatccattttatgtgtgtaccacttgagttttacaatattttgtagtattatgtatacgaaactttttcaatgtatactattttctttttcaaatgacttttttttaaaaaaatatgtttggtttaaaatagatgaaattttacatatttttattgataaagatttaatatattgataagttttgtaaattattatcaacaattttttaatgtaattttatttaaaatatgaaaagaaagtatataaattttaatgaataatattttagtaaaaatcacaaaaattgaaccgaaccaaaccataaaatattagtgtggtttggattttattttaaatgaaaatcgaatcaaattgagttgcgaataacactactttgtttgaagtagttatgagatgagttctgaccatctgttagagaaaaaagaacgagtagctcttgcaggattcccaagaaattcttcgatttcttgtggaagcggatgattattcatctgcttctcatgtgatcttctaggaaattcccaaaaaatgtgtgtaagtgaagattaaacataataaaaaagttttgtattgatttgtgggaatagtcattaatcctagaagcagtcaaaaataattgttgatgtatcataaaagattatctatagagaattctgaccaacaaaaatgaagaataatgttatcagatgctattgctcattttccacttgaactctaataattgtttctcaatcacttcttacatctaactttttgaattagacacttttcaaggaatattttgcatctttgaagccttcacaataataacaaaaatcttttaatcgaaaatctcatgtgtcatgtcgtcattagttgaaatcacaattgatgtaatggtctcgaactaactatagtgtgagtttatttaaacttaaaaaataataattttaaaataagtgttttttatataagtattttttttaataagaaaataagatgtacttcttaaaatgggcaaaaaattaaaatatagtacttttaataaaaaattacaaaaatattgtagttttcaaactatttacaattgtatagcaatcaatcacgtcctccctagacgtgttcaatcacgtcctccttgggcgtgactaatgttcaatcatgtcctccctggacgtgactcaccaggtggtgacacgtgtcattttgagacatgtgtcattttgtggagcgatgtatataaacttcagaaggtcataacttttgactggagtgtccgattgaggcgaaactggtggtcacgcactcgatattgagaggagaagatttaaggtcaaattttttccccaaaagatgtctctaagtacctcaaaattacgatttaatcttcaaaccttcaaaaaaaattttggtttctaattttttattttattcaattagtgaattgcatgctattttttatttttcaaaatacttcacttaatttcactcaattggacattccagtcaaaagtctcaattaattaaaaaagtaacaataacactaactgattataaatttaatccttgtacttgaaatcatctttttaacagtcttgcccattataagaagtatcattgtgttaaattaacttgacactcattttcgtttaaaataaaatttgttatttaggcctttacgcaaaagatactctaactccgcaattaattcatgatttttcttaaaaaatattaggatttttttacccaaaaaaaaatattgtcataatcattgggtttaatagaaaaaatataacaatttaacctaacaataacatgaaataatggtttaatagaaacattgatgattaagtctaatcattatctaagtgaccatacttgcaaatgtgcagaaaccacatcacgtatcttgttagattggaacaacttccatttcaaatttgaggttgtgttaagaagcttccaagctacctggcttagtgaagttcacaaaagcgtattgtttcatcctagttctgcaaagcatgaaattaatcatcaataagcagtttccacacacatcacggaaaaagagagtgagagagaaagactagctaaacataaggaattcaaaattaagagaagtaattaaaaaaataaaaatagcatgcaattcactaattgaataaataaaaaaatagaaaccaataaatcttttgaaggttcgaaaattaaatcataattttgaggtacttagagacatcttttgggaaaaaaatttgaccaagggacttgcttaaatcttctcctctcaatttcgagcgcgtgaccaccagtttcgcctcaatcggacactccagtcaaaagttatgacctttcgaagtttatatacatcgctccgcaaaatgacacgctggtgagtcacgtccagggatgacgtgattgaacaccaaccacgtccaggaaggacgtgattgaacacatctaggaaggacgtgattgattactatacaattgtaaatagtttggaaactacaatattttcgtaattttttattaaaattactatattttaattttttccccttaaaatgagtcaaaaattgatttttttaagcagaaataatttaaacaaatatactaaaaacaaaaaaaaactctttattatattaaaataaatattttaaaaaaaataaatttaaacaaatcagtctaatttatctttctctcaatatatatgaattagactttaatttgcatttatagttagtataatttattgataaaaatattttgaatataacttttttttatttataggaggagaaaaacctcattacaaccgtttttatttattggaggagaaaaacctcgttacaacttcaaaaccattctaaaacatgattaaactatcatattcttcacaagaagaaaattaaatataaattaacaataattatattatacatgttaaaaacatataacaggtatcatttgtgattatttgagagtataattttcatattataaaaatatataattaaattaaaaaaatcgtacgcaatttaaatttaaatataaatatggaattagaaccatttacggtttatacatatttttgtttccacgcgcgaacaaaaaatattgttggtttttctatacacgtttgggacaaaaattcatacggagatcaatcacatctaaacgcatatccttaagtactttttgtcaaaagtagcataattaaatgatgtttaaaattgtctacttagacagggttatgtggaaacttgcttatcgccgaaaatcaatgatcaatcttgagtactttcaagattattgaactatcgttgttgttgttggttttcttttttttgctttacagaacaaaatcatatcaactagtttctattgcttctggttttttgttttgttttttcagctcttttaaacaaaaaaaaaaaatatgtcaaccgggtttttaaagtttaacaaaatctcactaactacagtatatatatatataatttttttatattttccattaatttcttaattttttttaaaaaaaccttatattctcaaacaaatagtcattaatatttgaattgaatgtaaatttggatctaatttaatctcaaaacttaatttttaagatcaagattattctccacttacagtcgattaatagatctcagataaattttaatatcatgatttttattctaattcaactccaaaaattaatttaatgaagattatccttcgttttatatgcccaatcttaactttatttttagcatatattggatattaatcaaaacttcaccacagacatcttacaaaattaaatcaaatgcctgatcatttaaagccttaatatcaacctccaattaaagccgtcaaaaaaatcagaatccttctatataacgtgattatgacatttactaaaacatcaacatctagacaacacgatttctcaagaatataagttacagagtgcaattaataagattagtttcactaaaaaaaagaagaaaaaacaaaaagataggataagattagaaaaaggaacaacatccttaaaataaaaagaacaaaaaaacgcaaactggagatgactcatcaaactccattttcttctttgttgcaaggtcaaaatccaaaatcatggcacattgtacccattcgaaatgaaaaattccaagacccagatgatgttttttattacccttaccattaccactttcagaaaagcataattccttggaaaccatccactcctctgatccgcctgatacctttcttcacgcacatgcactcagtcacaggatatgaaataataatggctcagttaagcatgttcctaaaatattgattaaaaattaaaaatatttattttaaaaattatatgaaagcttaaaaaattataagtaatttaatttagttgatgtaacatgcaacgtgagttgttataaatctttgatagtctatttgattcttattgaaaaaaaaagataaataaatataatttgattcattctaataaaaaattattttttaattccttaattaatattatcaacagtaaaagaagataataatttaaatggaatctaaataaataaatagatcatgtaaaaaaatactaaaaaaatagaaactcaaaataggtgcaactctttttgtggaattctttatttccctctccataaaacataaacaaaatgactcactgcattgcattgttgttggttgcgtttcccttccccctgctagccaaacccacgtgctctctctctcctttcttttctttttctgtcttctctcagggagaaaacccaacccagccaaaaacggtgtcgtttctcggaacgttttttagagagagagagaggagaaagagagaaaagagagaaaagaggaaagagagagagagagttgtgttgcggtgatgcggaaacgttgatcccaaatgcacccgtacaaccggctaccgagcagcgggcgctcgacgccgtcgccgctccggtcgccgaggctccgccacacagggaggtccaaggccgggcggttctctccgagccgggggagcggtcggaccgctgcgcagcggctcagctggatgttcctttcggtcctccttcgacgacagggtgttttcctcttcgctcctctcatttacatctccggaatgctcctctacatgggaacggcgtcgttcgacgtcgttccggtaattaaacaccgtcccgcgcctggctccgtctaccgtagcccccagctcttcgccaagctccgtctcgacatggattccgataattcctccgccgatgcggttcgattcgttttcaaatctctcaatatttttattatttgtttatttatatatatttcggcggattttggtgatttgtgatttgtcaggttattccagtgaaatttgttttattttgtttttttatttatttggaatttggaatgttcgaaatcaagtttctactctttgagtttttataatgtaggtttagcctttttgttttgcgtctggattgttttgttttgcatcctgatttcaaatgtaatttgcttatggaagatatattgtggtttgtgatgtgtttctatggttagattgtttattaggtctgaaaccagaggctagatatttgaatggggtaatgtgaaactgattgagcaagtgctttgagcggttttcaggtagaggaaattggttgtacttgtcaaaggaggttgataaattatctgtgagaatgttaggattgttattgtgttaggtcttgggagttttgtcgttttaggagttttgttgaccgatattgtattggttgtactgcatatatttgaacttgacctagattattgttaatttgttataaatagaagtatacggtgttaatgttttatgttgtacatattggttaagtatattatcgccaatctgtataagaaaagtatagtaataacctataaggttgattgaaattgacagtactgctttttgtacttaatattggctaccaaaagttccaacttttttttcccggttacaagggaggtcatggtttgataggaaaggatattctaaacttgacattgagacttacaaggggtcaaacctaacatgaggttcttggtaaggaagctgggtggcaaggaaaaaccattggcagaagcatcaaatttctttttgttgctttctcctgtggttagcttctagcatattcttttttttttaaaaaaaaactaatcttgacctaacttccaagggattcctttgagatgataataatcattaccaaaataaactaataaagaaaaagggaaaatgtatagtgtatgtgtatatgaagaacttgtggtgtcttttttgtaagtagataattcatgccttcacatgggacaaaatttcatgtttgatgggaatattttatgaaaggcagtatattttgtgttcaaacctatgcttctgtggtttgagaagatatcaactgaccactaagctaggagaggtgtgagctttatattgttaagccatgtttgatttgatgagaatttaatgtttgactgtaatattggtatggattttttcttcttaaaattttaaaattttcttgaatgctggtggctaaaattacaagtttttgaagtatattttcagctctggtaaggataatttcttcagaatctttcatatcattttggttatgaccatccactagctattggaggatatttgattctgaccatgcattttttttctctcctatttttcaaaatttggatctttttgttggttttttccatagtactttatgaatcttcatacttttccaatttcatttgtttttctggaatagatggctactttcagtgacaggcttgtaaatttcctcctttcagatatctacaatatggaagtatccctatagaggtggtgagtggaaaccatgcgtgaacagatcttcagaaggtataatataatgcgtactgatgaagtgattatgcacaataaatgatgacatttcctttttatctcaattttggcaccattgatttgcttattccttgttgatactcatgtagttcctctggttgaagcttaatgcttgcatttttaggataaatctggaaaatcatatctgtatcatcttcagtgtactgagttttgttaactatgattttatatttcttttgttgataggcctacctgaatcaaatggatacatatatgtggaggctaacggtggcttaaatcagcagaggacatcggtaagtgttttctgtgcaatctgtttttccatatattcaaaatgtgctgaatgtatttttatttgactcatttattttgtgaacgatatcaattttctgtaggtatgcaatgcagttgctgttgctggctatctcaatgctacccttgtaatccccaactttcattatcatagcatatggaaagatcctaggttggtttgttatgctatcaattttagtttttcaggactatgaaaatctagtgttttatgttggcataagattaacacattttagactgttaattcaattatttatttatacacacacacacacatatgcatatatcacatgctgtccttaaaaaacttatttgaagaataaagttttttagagagaagggggaaagcacaactactggaggataacaaatcctccaaaacaggaaaagtggaaaacctatatccaacaagagatattataatcaagtgggatgcacttaatttgcattgtgaaaattgtattaccaaaatgtctgagattgtcatttgaaactccttgttaagattttctttcatgtcaatttaagtagttgaaacatttaaatagtaaaatcttaatttccttgttgatcattgtcttttaatagaggaaacatccttttacagtgttgaatatgactattggtaagctgttttgtcaaatggaatattatgcatttatattagtactttataagtttcttggttgcagggagtttctttatgtttttgatgattttgatcaaggtattcattttgaaacaatctaaactgatctataatgtttcgtgtgtccagcaaatttcgggatatttatgatgaagagttttttgtcaataccttgaaaaatgatgtacgggtggttgacaagattcctgagtacctaatggaaagatttggtagcaacatgacaaacgttcataatttcaggatcaaggcatggtcatctattcagtattacagagatgtggtactccctaagttacttgaagaaaagtgagtatatgatgcttgttgtatagattatttccttattctcattggtcataaatagtcatcgattaaacagtttggagtaattgttagttgtccagaggtgaaaacagtgcacaatgttgtagtgttgtggcctcttttctgccgtatggtatatttggcttcattttacggctaggaattaggattctgctcaatgttttgagctgatgttctttcattgttttctgttaaggaaaggaagggtaagggcccacgacccacatgtttgggtaacactagcaaaaacatatattaagagaaatgttagtgatattaactctgacactctttctatcatttgctctatgattgcctaaatttttttgtaaccaattatagtgggtcccacatctaattaaatttcagctaattatagagtgccattagcattcctcttatattaaatacagaggaaggctaacaacagtctcactaacactttctaatactctactattgactgaaatttattggaaataacaatatttggtgggtttcacttcttatttattctctctcttgatttagaagtaggacccaccaagatttgtaatttttaataaatttcagtcaatagaagagagtgttgctagaactcctcatatagatatattttccttcttgcttgttatctatccatttggattagtgttctgggagagagtcttatattatggcctaaataccacaatgaagctccatctttattcaatttgggacataacatataattttactataaaattgttatcatcaaatatgtttattattttgagataagcaggctgggagcttttacgtagatattgaatttaattttattcgtgcagggttataaggatttcaccttttgcaaatagattgtcatttgatgctcctccagttgtccagcatcttagatgcttagcaaattatgaggctttaaggttttcaagtcctatattgaccataggtgaatctttggttgaaagaatgagaaaacatagtgccattaatggtggtaaatatgtctccatacatcttcgttttgaagaggtttgttttgatcagttatgaatatttatattaactttgaacattaatatgttgcaactgatgcacatgatttcccatgggcaggatatggttgctttctcttgttgtgtttttgatggtggaaaacaggagagagaagacatgattgcagctagagaaagaggttggaaagggaaatttacaaaaccaggacgagtaatacgtccaggagcaatcaggatcaatgggaagtgtccacttaccccattagaggtaaatgtctgcttaaagctctggtgattttagcctgtatgaagaggaagaaaaattcagggagtgctttcttttttgaagttgctagtcttgcaaggagtttccaaatttttttgaagtgctccttatgcagcaagttttgttgatgtgtttttattaacctaattcatttgtttcatttataatcaatgccttaatccatctcttcaggttggcctcatgcttaggggaatgggtttcacgaaaaacacatctatctttttggcatctggaaaaatatataatgctgagaaaacaatggcgccactacttcaaatgtttcctaatttacatactaaggagaccctagcttctgaagaggagcttgctccatttaaggttataacatttgtactcttatcttattcgaccactccattggtttatgctatgattttgacttgagatacttcttctagaattattcttccaggatggctgctatagattacacagtttgtcttcacagtgaggtgtttgtcacaactcagggaggcaacttccctcattttctgctgggtcacagaagatacttgtatggtggacattctaagacaattaaacctgataagcggaagttggcattactgtttaataatcccaatatagggtatgttatattttattttgttcaattttacaaggatagaataaattagatgagttccccacacacaccccacaaaaatttccccttcccttggcatatatgtgttgtatatattgaagtaattatagttacaattttgggataagtgacatcaatactaggttattttgaagaaatatccttattattatattgaactggaggaaatttactcggaaaactattgagtaaattaagctattgagccatgacttggctactatatagaagaattatgctactttatgcaattcttgcctttacaactatgcccaactgtacttgtgctccaattgagtctaaaaggaaaatgttgagagtatgttttttgtttttttgctcagcgagagagacagtatgttatactaattagatagcatttctctttgtagaatatgttcagtttttgattttgaagaaccatatagcttggttttcctgctgttaatttctttagagttaggacattgtaaacaattgtgtttaatgtgagttcgatagatgttagtgaaaatgttcccaagattttttgcttaatagaaagtatctaaacatctctcctttctagatggaaaagtctcaagcgtcaactgctgagcatgaggtcacatagtgattccaagggagtagagatgaagagaccgaatgattctatatacagctttccatgcccagattgtatgtgccgtgcgaacagaactgacgatttgaaatcttcatcggcaacttgatctactcacagaatttgatgggtctttcatgtttcctatgattttgtgagcatgccttgctgctgctgactgtatttctgatattgtgattgtttcatttttccccctttccatctggtgggagggcatacaccaattttcgggggtcgaaaaggattttgttgaaggtctcattgatctgattatatatttggattgaatttcaagggagtggcatcttttttttgtacacgatgccaattcagaacagaatggcaaccgttcgttctcctttgcaggaaactcttccagaacattcattgacagagatggtttcacatatgaatgagcacacctgctgggacaaacaagttgatgattaaagagccaaaatgacaaactcgtgttccttcacaccctgcctgtacattaacctggtggagtacgatattcatgtgttaaatgctgtggcaagctctctgtacatttacaaaattcagggtgtccctccatactatttaattgttctgtttagatttttttttgggtcctattctcagttttgtattttgtttaatcctcatattgagggccccattgttagctacataggtttatggttgttgtacgcatttgctattctttcacattggtgccccattgttttagcgatgataccagtgaatgtaattagttcaccattcatatttcataccagatcaaccaaatgctgcaccataaatgccctagtaaacatatatcacatttaattaaaaaattcctatcattttggttaactagaaatgtgttctactatactgcaaaatagacctaacttctatcctctatgattacataatcatagtctatctatactaatgtttctatactaatatgttgtgctccacatattgaagaaataaaaattgattaaggaccataattttataattatataatcaaagtgtattctagtcagttaatgtatgatgaaataaaaccatttaaaattatacaacacttgatgaatttaaaatatttttatataactttaaaggttgtttttataaaagttaaaagtaaaaaattcattatttgatcattaggtcaacagtggcggacccacgttgggacaaatatccgcaagtggggacagaaaaattcaggaagcgacaatggtgaagatgatgaaacttaggaagatgtagaggtaaggaggagtgaagcacgtgagggggaaggttcacatgttgctggtgaggtaacgggaagaaggataaataccagtgaggtaacaaacgttgatggtgttgtaggcttgatgcagaatccttggtggatggaggagaaggggaagtgtgaatggagtggagaatgggaagtttcaaagcatgagtagaggagaagaggaagcgtgaatggagtagagatcgtgagtagatgggagaagaggaagcgtgaatgaagtgattctggagaaggggaaggacttggagaaagtgaagaaatgtgtgggaaggttatggagaaaaggcattgaagcatgggaaaaaatgcatttgcgtgtgagaagcgttaaatttgacattaaatttcacactatatatttggcccaatattactggattttgtacataattttttttcttatttctattaagcctcaattttttttatcttttctaaaatggatctcaatcaatataatttacagtgttactctagttatttgcaaaatcaaataccctctaccagtgtttaattatctattattatataaaattttatgttatattattgcgcattttgtttcaatgttatgtcattttattatttttaatttatatttcatttttcttcaattattcatattttcatttgtatttataaaaactgaaaaaatgtcaagttttaataaataaaaaatgtgtagattttttagagtttcttgtgatttcttgcatttgagcaaaaattttgtgtgagcttcttatgagtgtcataataatgtaaggactacaaaaagtaatgtggggaccacaaaaagaagatgaagaaatccaattaagcatatcccattggagatgcccttagacctctaaagctgtaactcaaactatcacactattattttagttatttttgcatataaaaatattttgttgtggaaaattattattaggcgtaaccaaaataatgtatcataaccttgtatataaagcgttgattcaaattttctttataaaaaaaaatttggggacactgccctcgaacccccgccactaagtgtgcgaacataaataaattttcttgggtccgtcactaaggccaagtatgctcctcaaggttcgagcttatccaagcaacttaagcatttacgggataaacttaaagcttggtgaattgtggatcagtaaatcaattgtactcttgaaggatcgatcaccattctaagatgatttgttatatttcattttatctttgtaatatcaaccacgatcatacgctcacattgatcaagcatactatcaaggacatgccttaattagagaccgttagaatgtgacaacaagtctttgacatgttcatagacacccaacgtattcaatatgaagtttttaagatcctccatatgtactatgtagcacgacacgtgacacgatacgacttgactatccgatacgacaatcttaaaaaattatggattacacaaaaaaattaaaccaaactaataatacccatcaatgtaacaaaaaaaaattcaaagaggaagcatgtgttgcaaaatatatataaagtgttgctatgggagaaagaagatgaagaaaggaaaaaagataaaaggagtaagttgagaatttataaaaaatgagaggtgaagaaatcgagtcccattgttgagacatgttagagcccaatgtttcaatataagcccaaaatttctctcaaaccacacttgctccaccttataaaaaattgcacacttgctcccaaaatttctcacagaccaaccacttgcttcaaacttttcaccccttttcacacttctctctctctcactcacatcagtgcatcaacatcacacacaaataaacactcctagtctctctctctccgcttgcaatgctccgtcgcgcaaccacctccctccaccgcttctccatcgtgtcggcgactcccgcgacgaattcagccttcgtggaggtgtggaagaaagtgcgctccaacatcgacccgttgaagatgccgccggcatacatgaagcctggaccactcactccctcgactctcccatccaagctcatagtcaacttcgtcttacctgtggttggtgagcgcgaacagcggtcggagcgaacagcagataaaggtaaaagcgaatagcggtgagcattgagcactgagcttgaacaagtgtaaactgtgaagcgagaaagtgtgaagggtcgcgaaaaggtccgtgagtgaaatttaatatttgtaatttttcttcttcaccaaattggcatttgaccgtgtcaaggttgttgatcgcgtgtaggacacggtgtcggcacatgtcggtgtgtatcggggtgtcgagtcgtgtcagactcgacctgccctgtacttcaacgtgttcgtgcttcatagcatatgtacacatgtaggtacatgactagtagaaaccaatgcaaaagcaacttgtatatgtgactgtaagatgaaatcttttacaaatagaagttgcatgactcatctctgtttatcgttagacaacattaaaggtaataataatagaaattgttaagcattaggatatcctattctatctttttagtatcttccaacacaaatagttatataatactttgtgatatatattcatattaaaaattaaaaatttattttttcattcttaaaaaattaaaagaattactccctttgtctttaattataattttttttaaaaaatttatttgttattttataagattcttttattaatttttagatgtattaattttttaatatattcttaattattttttcttcaaatattattaataaataattaactgaataaagagataaaaaataattttaaaataataatataaataattaatatttaatatgattaattaaattaattattttttaaaataaattaaaaatatctcataatttaagacgaaaaaagtaataattaccctcaaaaacaactttacctaattgaatgcgacaagtggataaaataatccacatttgaccttttgagaatgaagactgcaatcaatataataggtacctaggcaagtaagtacgacaatattaaacatcgaatctttgttcaattgcgaggcaaagcaagcaaagcacaacacaagatggggatacttagtccagaacagctccaattcttcaactctcaaggtatcctttttaatcttaagcataattcctaactcaaccaaccgaatctctaatctttggaactgcatgcgcaggttatcttgtgattgaatctttcgcaagtagcgatgagattgagtccatgatgaagaggatggagcagttggtagatgattttgacccttcttccaccgcctctattttctccaccaagaaccaggttactcctatgtcctaacattttattttatttttctcagtttcattttaaagttggatttttttttatctgttctcttactcttgctgtttttattttttcttcagcaacagatgactgataattactttttcgacagtgccgagaggatttctgtcttcttcgagggtattttttaaaaaaattcatcttttcagtttttgagtaattgggttccttttagtttaatcttttgtctgtttcactttttgcagagaaagcatttggtgatgatggtaagttaaagcagccgaagcaattgtcccttaataaagttggccacggtgagcttttatattctgatactaaatctcttattttgaagtagaaaggaattaaggataaaacttacatgcaatttttttttttgcttttggtgttatcctccaatcagaataatgaggtgtattaaaggttagtatagtgaaacttcaattctaataggaaaacaacactataagaatccgcttgtaagttttgagcaagaagaaatggggtactctctgaattgagaccgattattcaaatcgatgggggtaaactaatgagctcggatattaatgaactgtggttttgttgtgatccttcatattgtgggaaatagcgaacaaatgcagccaatgtggtctcagaaacttccaaaatcttgatgttatggttgaaattgtggttgttaaccgttttttaaaaccttggttcacatggcatatagtagaattagttagtttctggcagtggtggagctacttttctcagcgtaaactttttagtcttttaactttaatggagtggaaccacctgagctattgtgctgactggtgaatgcatgaggccatgagcttgagagtatgattgttccttctgaattaatcctattattttttaatctaacttttctttttgtgtctggggatgtgctgtgattttgtgcagctctccatgagattgagccagcattcaaaaagttttcttcttctgagaaagtttcaagtttgatgcactccttaggttacaagagacctgcaatcatgcagtcgatgtatatatttaaggtgcattttttattttgtcgttgtgacattcagttgctgatcatatagttgaaagaacttaagttcaatactttaatgtgttgaggcattatgttgagcaatagatatgtgaattggttggacatcatggatgtgttcttttactttcctggttcaagggcgggagggagagtgggcataagggaattgtgtgatttggttctttatttttgtactccaatgtggcaaatgcactttctccattttaatattgttacttgtgtcagttatttctttaattttcaataaaattggtgtattatgctgaatgctgctttaaagctgtattgttatagtggtttaatgcataagtttttggtgtttagttattcaccttatatgtttcttccaaaaggcacatatcttgttagatttttaatgattcttgaatgtaggttttgttgatattcaaacttagttaaagttacttttgatttatttatgtttgtgttttatttacatacttttgaatttgatattattttatggacttctgtatacactatggatatatttgggttggttatttcaacattgttgtggtttgaacttgaacacccacccatttttatatgtagttgacatattaaagctggttgaaattctctctctctcatttataatcatgctacgagtatgttgtgctccaacctgatttcactggagtttcatatacatgctatgatttttatttttgaagtgcattaaaatgagcaaaaccttgtgtttctttggtctcaccaccttagctagcatagttatacaattttctgattgatggatgctgttactattgtttattctaatgcttaagaattttccttttttaagtgttttatttgatgattcaaatgtgaaaaagcatacggtttcgttcaattttcatatggccacacagggcatctaagtatagaagaatttgatgcccggtcattatcattacctgatcatgaaatttttatatacagcaaccaggcattgggggtgaagtagtgccacaccaggataactcgtttctttatactgaaccacaaacgtgcaccgggctgtggctggccctagaagatgcaaacatattgaatggttgcctttggacaattcctggatctcacaaaagtagctttttcctaccttttggttcatttcttacctggatcttttatcctttgtttggttcatctaatctaattttttttcctttgcttttttattttatgtttgctgtagatgggcttgttagaaggttcttaagagatgaagacgttgtcaaattcgatcgaccatcaccttcatatgatcaaaaagattttgttcctattgaagtaaaagctgggtctttggttgtcatccatggtgatcttatccaccaaaggtttgttaaaactattcacttcagatgatgtgtatcatgaagtatagaagaaagaaagttgccttttaatgtgttcacctgataattcatccttgtctgcttttgtgtgtgaatcgcagctttgaaaaccagtcttcaaaatcaagacacgcatacagcttgcacgtggtggatacagttggctgcaaatgggcaccagaaaattggtgagttcagatcatgggaagagtttgtttattagcacttttccacctttaggaacttagttatcattgaaaggtttatttactaaaagatatctctgatatatatgatcatacatattattaataatacaccattcacctcttccttgattgaatctcttggataccaaccacttcaatttttgcctgagttttctgtgtgtttagtattctttgccttcaacttttgttagagtttgcatcatctttgtacttatgcttgtaccaaatgggttctaagtcttccttaatcccaataattgacacttgcaagtgcaaaaaagatgtttgttttatgaaaagtgtagaatttgccaaatatcacaagtttgtaatgtaatttggacttggcatgtgtcccaactacttggtggattttgctaaacacttgcttctttctgtctaacgttttttcaggatcagacgaaaagttgagccagaaccactctttgtaagctgaactttgcaaattgagagaaacgatgtaatgatgtttaatttgcaagcttaaagcgttgtaataatgttaaacccgtttgtgtacttgccactgaacactgattccacgtctttggttttggaatatgaataaatcaaaatttgattgtttttataatttataccaagagtgttaacacatttgaaaaaaataattaattttatcgatgaatattatttataattttagtatcttttaatcgagtttaaatatgtactaagtgtaaaactattttatatagatgtagacatctaataaggattcatcctatgatcacattatactagtgaataatttaaattctattggatgtctttatataaaagttttgtactgacattgtatataaatttttgaagaagtgtcaccacttcaaaatgcataagaattgagttggatatttttttaaggtatacatttgttattctaccagcatgcatgatcgtgtaccgtcttttaatcatttttaaatttttcatatcgataagttttgatccttcaattcataaatataaccaagagaacttaaattattcactagtataaaaacaaactgccaagttatcagaatataatcttaagtgttgattatctaattaacaattataactacacattgatactttagatcgagctagactcaatccacatgtttactgaaaaaaattgttcctaattccaatctctctcgacgaccatacaaatatacaattataatacatctttcatactaatttgtttcagttatgttttttaaaatctggactctgaacaagtttaattgaaacaccacgacatgcaaaaatcaagcgtggaaaaatattgagagggcattatccaaaaaaaataaaaaattacagaacaacatgaaacagtggaacaaattccagtattccgttgtcacattaatcttaacttccctgcaccgttaattcttttcttataaatgtaaagtaaattatcaatcattgatgaaaaaaccagtgattgatatttcaatgtattcataatttctgataaatgtacacgtaatattaatcattaattttaatcgttaagaattgagattacttattttactttctagaatgaattactcttttgtaggagtaaggtttttttacttttaagccattctctctcttttttttttttctgaataagcnnnnnnnnnnnnnnnnnnnnnnnnnnnnnnnnnnnnnnnnnnnnnnnnnnnnnnnnnnnnnnnnnnnnnnnnnnnnnnnnnnnnnnnnnnnnnnnnnnnnnnnnnnnnnnnnnnnnnnnnnnnnnnnnnnnnnnnnnnnnnnnnnnnnnnnnnnnnnnnnnnnnnnnnnnnnnnnnnnnnnnnnnnnnnnnnnnnnnnnnnnnnnnnnnnnnnnnnnnnnnnnnnnnnnnnnnnnnnnnnnnnnnnnnnnnnnnnnnnnnnnnnnnnnnnnnnnnnnnnnnnnnnnnnnnnnnnnattgatatttcaatgtattcataatttctgataaatgtacacgtaatattaatcattaatttttttcgttaagaattgaaattacttattttactttctagaatgaattactcttttgtaggagtcgtcagatttttttacttttaagccattctaatattattatttttgctgaataagcaatgcttttattttatgatttttcatcattaatacttttgtaacaataatctcgatctatttaatttgtcaaataaacacataacaaaaactagtttaaatatgtttttgtctttataatataccatttttatcttttaattagattttagtctctacaatattttgtggattttgaattaatcacaatcgatatattatagaaagaaaaatatattgaatcatgtaaaagtatattcaagttcactctccctcaacaataaagttaaccctttatttacctgtcgatactagtcacaaatttctgagcaagaaatgtctgagctgaagtctgaactgttttggatcaaatataggttaaaattgaataggataattattgtgcctttttcctattttgcacacggattcgcaagttgcaaccgagttaattttcacggcttaaacggttaaatagtacagaaaaattaaatgtgcaaataagtgtataccaactggacaatggcccaagtctggttttgattttgtcttcttttcaagtttgttagttaaatttaccaatcattgctcgaaaataataaataaaggatctacatcttttattctaaaaaaaaaggatctacattttaaaaatgtaaagcacgctttgtcgtttcgaaactggggtatgtgatgtgagcgaaaaattcaccaatggcttttgaattaattttttatctacgatgtctacataccacttttatcttataaccgacaagaaaaacataaataatctgatgttactaacacattttttaatattcactttcaatatattttttttctcttactaatgaaagtttggtaggtctcactagtttgataataagactcaccaaatataaaatgtgactaacatatttaataaaatttatacggtatagtgttaaacataaactaacttttgattaaatatgaaatttgaatttcttattaggtgttatctttgcaagtacaatttctacatattatttatgtaatttttatattattaattaattaaaaatcataacaatcatgaatttataatttataattaaataactataaaaatactttataccaatagtgcaataccactctttactctttttatatgttcagtatcttctctaggtttgtcaagtggctcgtgactcgtggctcatattaactaattaattattttacttgtcaactattactatagatgacattcagtacgtaagaatgaaaggtcatttgtacacattaattgcacttattattggatttgtctatatatgtgtttgcaggttctgtttgtcatgggaaatcgttgtctcttgccgaagtcctttacaatttacattgcttaaaatatctaccatgttcggaggtatcaaaatccctttaaaatcgtatatttaaagtgaatagggttttaaatggaggaccacaacgcctgttacatccgcaatattgatgttgtggagctacctacaaccacattagttagcaattgcaatgagttcgaaatcacatgaattgccacaatgcaacaacaacaaaaccgcaatagggttgcaactagaccgcaacaccgttcttttgtaaaaaaataaataaatcaaagattcagaacttaatcttctattctaagttttgatggttgaatgagtgtggttttgtggaatgtttggggagtgcaagaggcatttgatttgatggtgacaaatgatacaaaaaatcttaaaatgaacatatatatatatatatatatatatatatatatatgataaaagatatatcgataattaaaataattatagattttttttttttgaattatgtgcaatcatataataattttacgtcgtaatgtatgtaatttgcattgcaatagcctcaatatacacaattacaatgcatgcaatgcaactgcaattacaatttagaaccattgtaaacaacgaaaatctccttatgaatatttaatagggttgcacatgtttaagatttgaatttgggactactaattatcatttcacacattaggtggtatagtgtttagactatatatctttttacagttacacttacagcaaaggcctatcaatattatttttgttacaaaaagaaggtgtggtacaagggggaggcacaggtgtgtgttgaatgatgaactttcaccatcataattattgaagtgttaaaagacagatcgatcacaaatgtgaaataaaacaaatatgaattggacaatggattttcgtgagtgatgtgatttggtgttgtgttgtgttgtgttgggtgtgggaagaagagacagacagacagacaagagagtctaaggacacaatggctggcaactgcagaaatgcatatatacatacatagccacctcatctcaattcatttcagggttttttttcattactcaccttggcaccttttctctctctctctctctctttctttctacagagttgtttatgtccttttcctctctcacacaatattgctgcagacatgcagtgatgacaatcctgcaacttctagttttgcataatcgtagccaaacccttctttctttccctcttcaattatgactgcttcatttgcacataaatgcatttttgtttttccttttttattatattttttctttctttctttctctttcaatttatatatgtacgttcgtggtcaggggtgagtgatgatctttcacttctgctcttggtgggtcaacgtcagcaagccacgggagtttttttcttttgtttttgacttgttaaatgtatgtggaatgtacatttttttttatttttttgttatttgttttaaagttaaatatgctgttaaatttttttttctagtcagaaattatggatgtttcctccggatatgtctgtaattatttatatatggagagaatcgtgttcttttattaaatatattgttcttgtatatataaatacaacaaaatcttaaatcattatattaaattaaatatattttttaagtttaggtaaatatagaaatctttttttataagcaaaaatgaaatataataagcgcatttggattagttaactcagaacatctcgatcaaagttgagacttcattcacaggttatatgtgggagtttcatatagtttatggtattacattataattgtcctcaaattatgtaatttcttttatcagcactcaaaaattttagttgctttaaaacttctagaggtccctgagaaatgtgactaaggtctctcaaactcatgtatgccatgtgatgcttattaagggtgttattacaggagtgctgttcgcatttccaatttttacgtgaaatgtcattggatggaaacatatgtaaattgtgaagcatctgaataacatataaaaatataattcaactttattttattcaaaatagtttgaattgaactgaataatttaattactttatttgtttaaaactctgattgaaaatgctcatggattgttttttggttgtgttagatttttttcttcttttgtacattgtgtgtgtgagattaattcttgaaggatatagaataatacgattaggctctttccacaagtggggattccacctcgtcgaattctacccttccaggtaggtaactagcttcccattaaataatactactcttagttgtttttttagtgagagattataagtgtcgagattaattctgttcacggtttatttatgattgttattgattcaaaaatttattatatactataaaaatatagaacataatagattgttccaacttttgtggatcaacttacaaagacactgaacataaaaaataaaaacaaaaacaaaacacatgcactcgcatagacataaaataataaattaaactaaagcttttaatattattattattattataattaagttattatattaaatagttgcataaattttatcccactcggtctttaccaattggattctcaacataatactcaggtatcagtagagttatacgaaaagttaaataacaatatatgaatatatttttctaattcaatattagaaaaataaatatctatgttctattagttaactttaaaactcaatgacaaatacatnnnnnnnnnnnnnnnnnnnnnnnnnnnnnnnnnnnnnnnnnnnnnnnnnnnnnnnnnnnnnnnnnnnnnnnnnnnnnnnnnnnnnnnnnnnnnnnnnnnnnnnnnnnnnnnnnnnnnnnnnnnnnnnnnnnnnnnnnnnnnnnnnnnnnnnnnnnnnnnnnnnnnnnnnnnnnnnnnnnnnnnnnnnnnnnnnnnnnnnnnnnnnnnnnnnnnnnnnnnnnnnnnnnnnnnnnnnnnnnnnnnnnnnnnnnnnnnnnnnnnnnnnnnnnnnnnnnnnnnnnnnnnnnnnnnnnnnnnnnnnnnnnnnnnnnnnnnnnnnnnnnnnnnnnnnnnnnnnnnnnnnnnnnnnnnnnnnnnnnnnnnnnnnnnnnnnnnnnnnnnnnnnnnnnnnnnnnnnnnnnnnnnnnnnnnnnnnnnnnnnnnnnnnnnnnnnnnnnnnnnnnnnnnnnnnnnnnnnnnnnnnnnnnnnnnnnnnnnnnnnnnnnnnnnnnnnnnnnnnnnnnnnnnnnnnnnnnnnnnnnnnnnnnnnnnnnnnnnnnnnnnnnnnnnnnnnnnnnnnnnnnnnntaccatatcactattgaattttataataaaaaaatacactttctttgcttcaaaactctcttaaccaatcatattattattgtaagatgacttgattaataaactagatatagtatgtatataatagtgtgcctgtgtgtgtttatccttatactatacataccatgtgataagggataaacaacacaactaactgaatacattcttatgcattaattaaaatttcaaatgtgtccctatgatttagcaaaaaagttaatcactgttaatggataatatgatttattcaaaaaaataaaaaaaattcttaaaagcttttacaccatattttttcttaaaaaagaatctattgttggtttcattttgatgttgatcctatccatgccttgaacctcaaatcattaatatagtgttgcaatgtgttgcaataagcaaaccattagtccaaaaaatagaatttgtaaaactataaagatctatacaataattttattttatttatttttatattttatttgttcacaagtgatttctggcaaactcaagctttttcatcagagaggacccactgaacttaagctttgtctaccccttgtcctgtggatatctatgttgaatattcattcctttacgcaatgagttgttttcggcatggatttttttttcacccatacaaggacaataatgaattattatctctcttttccaaacttttttcgttcttctcatcctcaagagtaaaaatgatctctttcatagcacaatgcacgttgttaacttgaatgaaaaagggaatattcgacatcgacagttcttttaaattcatgatcacgagcataccaaatgtttgataacagatgcaaacaaatccgatgcaaaaagctgaaactctttaaacgcggaaagaagctgcttgtttaggcagcaagccattatgggttatggcagaaattctcttaacccatttcatccagtttttataaagtgaataacactcacataatcatcatatatatatatatatatgtacaatttttatcatttcgttacaagctcacaatatgcctttttgcatgagtaaatgcttcagtaccaatgtcattttaagggtaataagctatttgttagactagatttcattaaaaaaagaaaagaaagaaaaaaactatttgtttgattggattagttaaaggagtgaggatgtattggggcaatataggcgaattaacattgccaatatctgtaaaattaattatacttttatgaatattttacaaaaaaaaattatcaattcaacatgtatgttaaaatttaaaattcccaaaatgtagtttaaatctaaaattgttaaaaaaattaattaatattttattgcattacttcattttaatgtataatacgttatattaaaagtaactaaatatttattactatatgattacattaaaaagtcaaggagatctaagtcaattgattaaataaatgtataagttattataaatttcacacataaaaaaatgttaaaatttctaaagtgtctattgtaattaatttcacaaagtttgagttttagtgtcaattaatcttatatcattgctggttttacgtactcaaatattgttcactccagaatccagacctaatatgataacgtcctagccttgattcaacattcatatatactccccaaccacttctccttcaggatcgatgtgctcttaaccaacctctaccccaccccattagactgtgccacacgactagtatacgtccaaaaaggggtgatggggagcatattcttaatattatgtacgtttccatatagtattgagattagtttggctagctatcccaccttgacattgtttttttctactgaatagctaagtcatgatgatttatgccttaaataactcattgtatgttatcgtgctgccatgaggttttggttactcgatctagggttcaccaacggcaagacgttgttgtcgtcaagagcatcatatttccgatctttagtgtgtgcacctttgagtgaacgttagataattaattttgaatgaaattaaattttataaaattgattttaatcaaaattaagttgaaataaagtgctttatgtttaaatatttttgaatatatctttttatcctatataaaagtgatctaaaagttgtttttagctcaaaattaattaattcttcaacatataaagtcaagtatatataaatattcacctaaaattattttagcttatatttcaacttaattatatataatttaatgtgaatctaaaggcgcgcgttcaactctcaatatggcagttgcatgtagagattaagcattctttattcatagtgtttttgttttaccccttgcgtctttcttttatttccaaagtccaacaagcaatcaaaatctcctgcggatattataatgacttgcttgttgatgcccttgtgagtcatagtgactcatacctcaaataatgttatatactactatttggtgttacattcttggtgtttaagtgtgaataacaaatatcatattgaatatgtaaaggaatatataagtaacaaactcataattaagtggtatatataagagttgatggtgtaattaggtgattaagtgcaactatttaaagtatattggtgacaatgaataacctgtaagtttaaggttcatattgaatattcatgaataaaaggattttcttcttgagaaaagttaacatgtgaaagagtcttagacttgtggagattaattgttggtgggcaagaatataagtaagaagtctcaaattaaatagagatgagtatgttgagcaatgtttaagtggtaaagatccaaaaaatttgctctgaggttttggatgggatgtaacgtcaaattcctaactaaattaaaccttgattgtataaattttttataataaaattaagctattagtaagactatgcagactttatatgaatgatataatatattatacatactaaaatatcatctatcttctacttgatctgattctttatgatctatgctagtgttttgtatattgacaatcaatagcaacaatacatataactagctagctactaattttgtgttccacacgagaattatatgtgccaaacacttgaaaattgatggtcacatgataaggttcatatgcatactcaagtctgtcttggtaacaaatatgtatatacggttctcacttaaattcttaccttccgttcctttgtcacattttaatttcctctcaagatggtcatggtagacatctacaatccaccttctacaaaacgaacctaaatacctacaaggaaggttatcaatcaactatcaagcaaactagtacatcttaattacgtacttggtaattagttattaattatttgccaatatatcagactagatgattaatcatagtcaagtctatgatatatttgtatgtaccatatgctactcataaggtacgtgccttgtatatatatcttctccacctcaaattctatgaatatgaactaattctaatcaaggaatttacacacaatagaaaatacatagtatagcaatataaagcttgtcaatatagctgtcccttgcttaaaacttaattgtctttttgttttctttctaaattttaaggatatgaatttaagtatcacacattcacaacatgttaacattttctatatatggaaaatatatcaggtgatgaaagtatagcagaagagctaatcttgaataagtaataaaaagcaaatgatttaggattaactttaagtaaaacaatcttgatcacttacaagttataacatatgatgaagatgaactcttctcagttctctctcactgggtgtgttccaatgtgaacaaagacacagagacaacgagagacagagactctactatactggtttgtgtacaaaaacaacgacccttgttttgcaaatcattttccacgtaaaaagagagtgtgagtttttccatcttgagttttaaaacaaaaagatattgagtttatgagaagcacgtctttcccaataaccagggacttgactcaaaaactgaaaagtcgtgaagttaattagtcaacaagacaaaaaaacgttaggttcaaatgcacgcgtacaggtaaacttctacatgcatgatcactgactcacaacaaagagataaatgaaaccaaaggtttgcgagtcccaacgaaaacggcaaaaaaaggagaaaaaaatagagaaattaatagacatgtatatatcgaagatataacattaaccttctgattggagaaggaaagaggaaggaaatgcgctaggattcaaatcctttcaactatatatatttctaacgaaaataacaaactaacatttgttaataaagaaaacatttatatatattataattcgttacagccaatattattattatttggtttaacaagtgcatatatgtattctaaaatcacatgacatgacataccatatataaagtgatatgatccctttcagtttcttaaaggaagaaactcaaaaaactggttgtttgaattgatttcagtgtccatagaagcacttgcacagaacatagatgatttcttctcagcaagagaaattccatcttgatcatccctcttgtgtggaaataggtcaagggttcgaggatctgcattttcttcaccaccatagtagtttaaactttctctgttgatgagtgaagatggtaaattattatatttttgaggggttaaaagttgtgtgttataatgtgttgttctttgtgaagttgtaagagttgatgctgccatagtaataggagggaaacaaggtatttccaaaatttcttgcaacttagcttgtttttctgctatgtttttcctcatcaaaacttgtatgctgcctctctcctcaaactgagtccacccattagatcccttttctgctatatccagtgcagcagattcctgaaaaaaaatacggatagtaaaaagttggcagtaaaaacaattaaaaactaaaaaatagaggaaaaaaagagataggatagagagagaaaaatgggggaggggagaattcactaattcagaattcgcattcatcaattcacaagtccaagaaaagtgtgaactgatctagcacaaaacagccccaacagaaagttaaaaaaaaagcagcttttgaagcctccttttttccaagattcaaaaaagctctagttttcttttcatttcatttcatacttctcaatataccgagtaaaagaaaattgatttttagctatatcttttatttcacctagtgaattgaagaaaataacaagactctattaatttttggtattctataatcttttgggggggtatctttggttaacaaagcggaataaaatgttgtagtagtaccgtgaacaaagccaagagtaattacagacctctgcatgtccactgcagtttgaagtggatgcccacttctttgtctctttaactccacaacctgtctctttcaaccctgtggcaaaaatccaaacaccaccaaaattcaacgtcaaatcttgcatcctaaaaatcataagaaaccacacacactctctctctctctcttggttgtaatcatcagtgcaagagtgatgtataatataggaatcttttgaccactaaaagaaccttgaatagccccaaaggcctaaaaaacgttatgggattagcacatgatataatatctagctgtattatatgtgtcctattgccttttctgaatttcccataacgtactactttacttactactctttctttctttcttttctttcttaattaccttcaccagaagaagaagcagcaatattgttattattgttgttattattttcctccatttcccttctacgccgcttctgtctctctctggccttgtgattctggaaccagtagaacacgttcttcccttcaatcttcccaaactggcgtaactgtgaagctatttgttgaatttgttcagctgagggtgtttttgtgccttgcctatacaattcctcaaggactagtaactgaactggggttggactccaccttgtgctttgttgctgctgggactgcaaattattattatgggaccctgtgctatttgtcccttcctctgatacattacctgcaccacaggacacatggaaaaacaaaaaaagatatatatggttaacttaagtgtaaggtcacacttcacaatagcatcaaatttcttaccataacaaatcgcatgtttattaatcatattaaaacaaaaattgcaagactatatactatgagtatgtatgagaattttaagaatcaatgggtttggataagcgttgcactcgttccgaagttatacaaaataaaatatacaaagagtatatatatccggccttcttcaaaaatatgtttagaataatggctaattaattatccaaacatgaacttataaatattaatttgcttaggcttaccaacatggtggttgaaggtgaggatgtggttgcaatgggtgcaaatgcaataaggttgggctattgagcagaatgtggtgactttggggggtgcatgggaattgagggtggtgtttggagtggaagagtgaaaggtgctaccaaatgaatcagacatgttggaggttaatttagaatctatgctacaaggtcttttgtcataatattgcacatttgctactaaggtttcactttcagccttttggggtttgaaaatagggtttctttctgagaaagatgtaatgggatgggggtgaagttaatgggaggaactgtgtatttatagggagagggaacgttgtagtaaaagctttaggtggagcagcaacaccaacaaaagagttgaccaatatgtgtgtaatagtaataatagagaaaccaagtattcaaatcatgaggagagagggagagataggtgggaaatggaaagcacagaattctgagagatttggagagtgaaggtgtgtgtgtgtttctgaaaaaggacacagcatgatgatgatgatgtaatgttattaaagttgcttcttccccatatgtctcctctttcatcctacacaaacacgctcacatggttaattttttttcctcacagtgcttggtgtgcctttaactcttctttcaaagttttttttctctcctcctcttggtttaagacacataacctacaagtacacaaagggaacctgtttcgtatggggacttctttgcttttgtcttgtacctgacagttgacactgtgtgtatgcacacattacacttttggacaatcacaacttttaacacccccactattggaaaaaaagaattatctaaatgttgccaagcaattaagcaactccaaccatgttgtgatctaagatagatgtgatgttttcacaaaggtttaaattaaatagttaagaaaatatctaaacttaacatcttaatatatgacccaagacattgccatttaaaaaaaaaaatttgctcattttcttccaatgcattccaaatatttactcttaaatagtgaagaaagaatctaaactagaacaattttgagctaacacagctctaattgaaggaatatttggagaaacgaatatttacaaggccatagatcaagatagtttctaaaggcaaaatgttaagttaaggcttaattttaaagtcacacgatttgatatgtattattgatgtataacttgtatcgtttcctacttgcgttttctgaatgcatgtaacgaatctttgcgttagaagtttttgcactaagtttacaattgagaagcagagggccaggggatcatgttgtgtgtgaaataacaagcactttatgctaactatacaaacaggtatccttatttaatttcagccaaatgttttactttcacgtaactgcaatgtattttggaacacgtactcctaaaataaagtcatgatttcttgacagcaactacataataaatcaatctgttgcaattttttatggcttgctggtacagttagatgatacttgaaataacatagagcttaaaatcgagatcacaattttagtaacctgacatgatcaacctcatctcgaatgcaataggtctttggggaataaaatgcttctaataatttgtttttgtatatgtatagaagtttagaatagctagggaaatacttatcccgagcatagttaggaaaaaatatcaacttcgatgagaatttacaataaaactaacaaattgtcctaaaactaaatcaagtattaactttgcaaaaatgcttaatacatcagggcttcgatcccaaattcatatgtatggagaaatacttaaaagtcaccagtctcttgaataaatcttaatcaatacccgacatattagtctcagctgaaggatatcttgaagttatccaaataatagaattgttatctaatgtaatatgtaatatatatttttttatactttttatcctttaataagatatctttatagacaaatatgtaagactaataatagagctgagagtaatatatagttgggtaagacattttataatatacattcactttttctttcatatctttcacctcatttttttcttcaaatctatcactttttctttttatctcagcttctttctcataaattattaggtagttttaaacaatcacgtgtctataaaaataattaataacacttaattttgtgtcatataaatattagttgagagacttgagaccaaaataaatataattatttttccttccttccaaatttaatttttatattctccaaaatctcattttcctaaataaaaatttacaagtttaataaaggttatcacaatttacttctactagctacggtcaatttgcatattatgtattattggacattttatttcaaaatccatctaattaaaacgatatatagtcgatctatcggattaacattttatgcttacatatatgatcatacagacaacgcggaaagagttaaatgtcagattattcttggttcatgtatcaccaaccttttttgtcatccatcattgtcataaaataagcttgcgtgtagagcatactcagatactgaatgcttattgaatgtaaagcaaaaactttatcgtaaaattaaggcatggctgcgtgtctcacgtgtagaataaatactagcttttgtgtaccctaaaaccgtaaatagtggctacatcatctagccaacctcaaactcaatctgttgtctcaagtttggaagctgattaactattgaatgaataatagataggtgcttgtcccccgaccatctcttacaaaagtcaataataatgttgccttttatattgtttgttgttagagttattcatttatttatacttacaagttacaacatattgaatagtactctcactctcgatatatatcctctcgatgagattttatataaaaatggtatgttgtaaatgtagtattatgttgtgttatttaatattaattactatatatatttcctatatctttcacactgacaagtgacaacacaagtgttttttttttttgtattgcatgtgattgggaaaatggttatacaatcgttttaagaagagtgttcagaatttaagtaagctattaattaaaactgttaaacattatatgtactagtctagcaaactaaagattggtcgaaagtatgaaaatttttgaattttgctaataatctcgtacgtaataaaacaccagttgactacttcatgctttttggttgataccattatatcaggcttaccgtgaaagtgtagaagccaaagcttccctctcaacatttaaccgctgctatactaatactataaaaaatagactatgcaatatttttacttcctgtgtcgtacaatcacaacttaatcatgtgtgataattttattaatttttataataattaccaaaaaaacttaaaattggatgagattatactattagtgcatgactattaaatttaaattacaatttataagaagacaccttccaacgtgggaaggctaaatagatcttgcacagtgcgaaagttttttcgatatccctgaacaaaaagtgtagattatttttttggtaaaccacactgtattccactctgcttttattttaaactcattttgcttaggaacagatggatccaatggttgaaaaagctttcatatggaaacttagccttcgcacactagaaggcacctacacttcacctttaaagaatgttattttaaaacgagatcaatgaatgcagatttaatagtgtaacgatagttgactcatgatccaacttgcagtaattatatttatattttatattatataatataatattttaaataataaaattaaataatataaatttgtgttatatttttcatatataaaataatattatgggcaatataacaaaattggctcagtaaaatatgataattcttatgttgttgatgataaaattttatttgaagataaaaatgagaagttttaaaaattgaatcacaattcaaatttatgatattaaattatttaaaaacatctattatttttctaatgcatttacaacttaaaaaataatttcaactatttctattaatgttgcatatgcttaaagaagttttttgaaattaaaatttttaaattcttatttgtgatttattatgtaaatagattaaataaaatttcttttatttttgtctatttttttaaatcttaatttataaactgattattaatgattttgaaaaaaatttaaaaaagactttattcaaataaataattatgaaacatcattttctcagtctggatctatcgcaaatactcaaatccttatttcacattacctctctcacacacaacacaaaaaaaaattaaaaaaaaaaatccttatttcaaatgtgtaattttttatgtcgtgataaaatattaaaatttacgtatatatggacctggattcattaagtttctgagggattgagttgggggaactaaacgggggcccataagctaatattgatcaagattatataataggcaaatccatgatcggagttccattttgggttttcagtggtttaattaatcagcagagaatcttgttgcttgtttaggtttgactaggtcaaattagctttaagtgagaacattattcatgaagaaccacttacgatgaaattatgaataaggttggaacaataaacttgttgattagctagttagtgagctgatgaagctgtgctgcagttcttggcccctaaaataaaggaacttgactaatgaaacaataactagcattctaaacgctcgcaataatcttaaaatgttctaaatgttggggaataagacaaaatgataagccctacaaaacgtgtgtggatttaacgactaacttagttaatttagccatgtaaaaaggctttgtaaactaaaaatgttcacacaatcatcaatccgtcataactttaatttttcattgtttcattattctttaattttcagcctttacattcatcctttatgactatgtttatagttttttttttttttttgcctcatttatatagtttttcttcaaacgttgatgttcacacaatcaatagtagcagaagttatggctctattttggattgcctcctctagctctaggcataggtgactatgactcacaggtagaaatttgacaactcaaaaattatatcagcattttctccctcagcacttgatgcgatggattttatagcaatataatgtcatattacaccttgcccgtcagcatttcagtatcttaaattctcatgaatggtgggcagatgtacatcgtgagttcattaattgtgtgcatcaaaattcaaaatctacatgtattttttttccccttttaaattgttcaggctttcttgattgaatgccgctaatgtaattaaaccggatcagccaaagaacttagtatgtttgtttccagttcaacttgttatgtacaaattttgagatcaaatcaaatggtccaccacatactgaatgcaaaatgaaaggtgtgaattttttgcaatgttcattttgccacatgcctgtttgcagggatatccaaacatgttctggattgggctgtgattcaggtttgagtctcaaccccgtgtatctgttgtctaaatgaccaaatttgaaaaggtctaaacatgttattaagggagtctttttttgacagaattattgagtcttagtatggcgtttcttcatcaaacaaaaaatagtgtgtagataaggaactagggaactaagctaagtcactaaagtgctgtttgtgatgatagttagttcataattatgttaacataacattttgtcctttgctttgtagggaaaaaaaaaacttcagttctcctcaaatttatacttttttcattaaaattattcagttctcctcaaatttatacttatttcattctttcattaaaaattatgacacggtatgcatgattatgttttttttgggcactatttcgacacttttgtttgagatgaaaataagaaaattgttaaattagaagtaccaatttttaaagtaggtagagtgccaaaaaatctgcttgctttatagctcagataaattcaatacctatcgttgatgaaagcaactgactgactcattaatggatgtattgtcccgggttaattgtttttatccttattgatgcagaggtgaggcattcttcattgttaactaagacgttgatattataggattatctaaaactaatctaagatgctttgatttagttttttttttttttnnnnnnnnnnnnnnnnnnnnnnnnnnntaatgaaaaaacaatggagggttgatgtgttcaagaaatgaagagaaatggttatgtgcgtgtttggatctttggtaattttgttacatcacgaaggtatgaggcaacttcaatgtaaaagcaaagaagagaatacttcttggaaatggaaattgatactagcaatccaaacacgctgagtatgtttggcttgccattacaaaggctccaaacgacaatatttaacacatcataatgataatagtgtgtatttctattgtctcactttccaatacaactgaacgttggattggcgttcaaccaattttaagcatacatataaacactctttaagtttgcaagacagctatttgcctctcaatgagagatctgatagtatggtctactcggcttcctctaatcctctcagctgactagggaacttcgggaggaacttaacaccaagtttgagaagaaagaattgcattcttatggttcccgtctgaatttttcatagataagcttttagatacttcggttgtgttccaatctatgattccttgtacatatttcaatatttaaagaaaataatgcaatttaatatacgcatcttctggtctcttctcaaggaaatatttattattaaatatgtataaatatgagtaatattaaatattatataagacttgtgtattataggtttccaaccacacctaatagtgtgaatttctactgtcttcccctccaatacaactgaatcttggattgacgtttttaaaacataaatacaaacactaaaagtttccaagacagctcatttgcctctaaatgaggtctgatactagggcctactcggcttcctctctgctgttccattctatgattctcatttcctttgatttttttttacttctaaactaggttcaattgggacatgttaagcaagacttttcctttgatttttgcaatcatttagcgttttaaaaactaatggtagtggcttttctcgtttttcttttgtacaacaaagattgaagcatttactattcctaccacagcgaacaaggccgagttgaaaaatattcccaactcaacataactctatcttcaacattgggttatgtttattatacccttgcatgctttatttgcccaggaaaaacaattgtgttgggattctcactaaccctcatgcactggggagtaaggatgtgagatgcaacattaggaactgcatactggtctctgcatagaggtgaaacgaatgtaaacccaggtaaatttcttcttttgcctgtctctccatatctttgctcaataaataaaaaactgttgttgaaactcccttaattctactatgttaattttgtttagcacgagtttgaattttaattagacttcattttgaagacctatgctgtaaatttggagctaaatcatcaagctgaacttgtttttaaaccggttcttataataaaaaaggaaacgtgtaaaccggttcttaaacatttgattcagttcggttctcatccacaaaagctaccgagaaatactcccaacatataaaaaagaacaatcatatacgatttgattcaattacacttcgaagaaacatttcacaaacgtgacaaaccccatcgacattgaattgaaccccttttttactccatacaatcataacaccttcgtcaatactaaaaccacaaaaattgtcactttaacaactccatgattcgatattcgcttcaataattttgcatacgaaacaaaaaggacaataatccaaaacaaaaaagttaaaattataatgacgccgacactttcaatcttaaaataggttttacgatttcccccaaatttgataatacccatttcagtttctatgaagcaattcataaccacattccagcttccattcattcaaattcagattaatcacaagcgagaagcgcagctaaacacgaaaccaaaaatctcaacattcgcaacaaaaaagaatatatcaaagactcggacagtatatcatttcatataatccaaaaaccctaattttacttgaaaaacatactcggtctaatttaaagcagcagtagcagcagaaacaaaaattaaaaggcttacgaaatagaaaaaaaccacataaacacgaaacgagaagagcataaaacaaagtcttatatctgaaaccaaaagagtctccatcagcaacatgaaaatcagtacctcctggtgaaggggaaggtctgttgaacaggaacagggtcaacctgcgtgatgccgggggtgtcgttgattccgagggaatgaagcatttcgagggtctccttgtcgacttcgatgtggtcggtgttaatggcggagacgtcggggacgaagtccatgcggcgctcgcgctcctcctcctggagcttgagggagatgccgcgaacggggcccttctggatgcgcttcatgagatgcgtggagaaacccgcgatcttgttccgcagcctcttggaagggatgatggccacttcttcgagaagctttttgtttgtgtggaaatcgagggtcatgcgcgagtagtaacgctcgatcacctggcgggaggatttcttcaccgtttttgttctcacgcgacccattatgtgttgtggtggttgttcttctgttgccgccgctgccgctgccgccgccgccgccgctgaggtgagttctttctctctgtcttacctgcgcagaatgatctcagaagaggcacgagggatgaagtagggttttggtttttattggatcgggtttggatttcaggctttaaaaaatattgggcctaacctagtttaggttggggataaactattggcacaacccacaagtgtttttaataaaaaaataatttctgcaaatgtcattttcaggaaatatgattccatttgatagaatacataatggaatcatatttctcttatataaaagtgggatgcaaaaaaattacacaatagaaacatgatttcattatgtattttacctatggaatcgtgtttatgttatgttatttttttacaccccattatatgcaaaataatcgtatttttttattcaattttttcatccatttagtaaacaatggaagcatatttgtgttgtttcttttctattaaacaaaaatgcaatttcaatacccttcacgctaacttgccttgccaatatctttcccattctctttcctagttgaaacttctttcatttccattcaatcaccacctcattcccaattgagtcgcccctccccacaacagcatcacaaagcctcgtcttcctcacatcgaaaaaagcaaaacccaacttcaccttcctctacctgagagatccaaagccttgtcttcaacacccacaaatccaactatgtcttgctagtgatggtgatcgcgccaaaatggttgaggttgttgcgaaatcgacttcaagattgaggatttcaagagaagggtgggggtggtcgcagtgaaggaatggcaaaggacataatggaaggggttaggaaaattggagatgcggaggggtagggtttccaaacaagggcaataatggcaatggagtagcacgatcatgccataatagttgaggaggggttaaggagtgggaagtgataggggaaggtgttacggattctattaatgagtttagtggtaaggcccattgaggagtagtggactgttgactctaactaaaagttagatcgtggaccttgacaacttcaaagattgtgacaccgagcggttagagatctcggccgtgattatcgggaaaaatctgcaactgacaacaggtaagtgcaatataaataacggatacttttagaggaaaagatatacacattctcgttctctcttatttccatttacactgtgcacacacctcaccccttgtggttatcctaagcccaaaataaatttttgtgtgaattgcgatttgtgaggcaattataatggaccaaaagaaacttgacaaaaatgtcgggtgcgacacccatttaaaatttagggtgaatttaattttaatttctcaattttaaatataagaaaaatacatctaacccaaaataatcaaaagggtgtgaacgaactatgattcacgtttataatgatccaaaagaaaattgatcaaaagtcgggcgggacacttatttggtctataatcataaattaattagattaataagattattttgatgatgatttatccattaaagttagtctcgtggtaagagtttgagtaatatatacaaggttttaagtttggggtttattcattaaagtaaaaacttattgatgttattgtcaaaaaaaaaatgatgatatataactgaatatatttagttatataaggaggtatcaaagttatcttctttttgaaataggagtcaaatttgttatattaggataaattattacttctaacaaatgatgaattttcaaaaaaaaaaaaaaaaannnnnnnnnnnnnnnnnnnnnnnnnnnnnnnnnnnnnnnnnnnnnnnnnnnnnnnnnnnnnnnnnngtacgcacaaattttatgaaggttcttcctggagagatatttttttcttcaacgagactttgttctattaatgtttcataataattaatatttaagtaagtaaaaaataacctaaaaaaagaataaataaaaactaacctaaaaaaaaaagaataaataaaaactaaattgttgaatcgggtttggacttgcggggaaattgggcttaacctatttacaacctgtgtttaatgttctaagacgaaaacaaggttcttgttatttacgcttccatgtttgctaagtacaccctgtacattctatttatattcagatttgtttatgactactgaaaataactttctagaataaaatataacaactatggaaagtagttttctgaaattatttgtatttggttaaaatataattgcggcaatttctttctagaataacatatactaactcttggaaaataatttataaaattatgtgcattttgtgaaaatatattttcggaattattttttggagttgatatatatatatatatatatatatatatatatatatatgtgtgtgtgtgtgtgtgtaaggaaaaaaagacaaataacaagctaaaaggtcaagagagactaactccaacacatcattaggagcaaacatcaaatccatggtggcttctagggtgggaaaggcaaagatatctctcactatgagaaagtaattatacaccattagatatattactttttaaattaagggctcatattttattctttttctttttttcattttataattttgtttcttcttttactatttaccctttcttctccaatgttttccatcactttagaccactgctttcagttaaaaaaattcatttagtcaaataagtttttcaagtgataaaaaaagttaataatttactaaatgccttatcaaatacactattttttctggaacgagattttgatatattgatgttttcataataatgaatatttaagaatacataaaaactaaattaaaattacatcaagcattataaatttataatggacactagataaatatttgacaactcaacaaccgttaatattaatatatttaataaaagagtgaatatctggaagtaactcttaagaagaaaataaataaaatgagaaagaaaaatagttattgcatgatcatgtataaatattgagctattttggataaacttttccaaaaatacttttaagagaattaaataaaataataaaataaatttattctaaaagttaaaattagcttatatatacacaagttaaaaannnnnnnnnnnnnnnnnnnnnnnnnnnnnnnnnnnnnnnnnnnnnnnnnnnnnnnnnnnnnnnnnnnnnnnnnnnnnnnnnnnnnnnnnnnnnnnnnnnnnnnnnnnnnnnnnnnnnnnnnnnnnnnnnnnnnnnnnnnnnnnnnnnnnnnnnnnnnnnnnnnnnnnnnnnnnnnnnnnnnnnnnnnnnnnnnnnnnnnnnnnnnnnnnnnnnnnnnnnnnnnnnnnnnnnnnnnnnnnnnnnnnnnnnnnnnnnnnnnnnnnnnnnnnnnnnnnnnnnnnnnnnnnnnnnnnnnnnnnnnnnnnnnnnnnnnnnnnnnnnnnnnnnnnnnnnnnnnnnnnnnnnnnnnnnnnnnnnnnnnnnnnnnnnnnnnnnnnnnnnnnnnnnnnnnnnnnnnnnnnnnnnnnnnnnnnnnnnnnnnnnnnnnnnnnnnnnnnnnnnnnnnnnnnnnnnnnnnnnnnnnnnnnnnnnnnnnnnnnnnnnnnnnnnnnnnnnnnnnnnnnnnnnnnnnnnnnnnnnnnnnnnnnnnnnnnnnnnnnnnnnnnnttgataaagagaatatgacgaatatagtgtgtaaaatttttattataaaaaatatttgctttttttggaagaattgatttttaatatatatgatattatggatgatagaagaattgacgttaaaaaattgattcgtgttttagatttatcttttaaaatgagtttagaagaattggttttctattaatgataaagtagagtttctttaaaaatgtaaatacaaatataattttaaatttcgtattttttaaaaatattaaaattttataccaaatatatttgcggtggttggagtaaattctaaccatcacagctgtgttcttttaatttgctttgcctcaaccaaacaggctacaagtacatcaattccacacgattggtaaaaatgtttgaatagatttaactatatagggaaaattaaaagacaaataactcatttataattttataaatatatacgaagaaaaaaaaatttctatagagggaaaaaaaattatcatcttgtctacatccctaaatggttgcttattggaatagccaatatttgagattgaattgttgttaacctcctcctcctttatgatttgtttctgtgtttttgtagcaattatgaattcgaagtgagtcatttggcaagcattatatagctgtacaaattggagctagggtggctatcaatgcttcagttttcttgattgatctgcaacaatagtaagggacaccaatatcatattttagcatttgaagaaatatggtcttttttggcacgacacaaacccatgataaaacatattgtttaattttagaagaaaaaactaaaacaatagaaaagtaacaaatcaaaaggagtattttctgaagaaaaaaatgtaacaacactcttagaaaaaaattgtttaacattatttaatattcttagaaatacttttggcatattaaatgtatttgtaatattaaaaaaacatagtttttaggaaatatagttttagaaacatgattctaaataacactggtttatttaccaaaaaaaagagagcctaatttaccaaaaaaaaactacacttgtttaaaattcttagggacgaaaaataaaatgtaaaaaagttacaaacgaaagaaagtatttagattttaagaaaaagttgaagagtttgatatgcatatatttagctatttaagagttttaaaaatgacttgttctcaaagaaagcaattagttagagcattgtatttgttgggcaacaaaagattaacagggtccttggtaacatgatgtgaggcttcaaagtcaagaagttaactttggtcatctaaggtctcatgttgggctaaatgggtttgagatcgtttattgggggtatggatagccatgaattttgtaacaggtcttggcagtttgacctataccatcacaaaattgaccgactggagttgtgagtttttatccgtgttagcagatgaagtgtgacggttctgcgattggtcatgagaggtggattatttcttgcctcaagagaaatgaaagtcatatcgctattgtgcatagttggtagtcactggagtagagtgtgagttatgataatgttgttgcatgaagatttcaaaacctaccaatttgtcaaagagttcatcaaatagtagatgagtgtctctagtgtgaattgaggttgtgaattcgctaattaaacaacaatccaaggttattaagggcgacaatgacaagatcaaggtcattgatgggatgaccaatgagatcaagtccatccgatacgagtcaaattgattgtatgtagataatcgttgacgctagatgtgtccatggtaacgaataaaggtattcttttagagacacgacacaagtgtgagatctatttactgttgggcttaaaatccaagtcaagtccagtccaatatggaaatattaaggttccatttttttgatagatctgcaaccaatttgaaaacacaagagagagacaaaagagaggagatagagagcggccaaattcacatgttgagaaggacataaataattatctttctatctacttgatatccttatttaactgttagatcttgttgaaacttttacagaaaattcttggctcatcactcttcacctctacgaagtttgtagcatcatcggaaattcccaaaccaaattggttctaaagtagtgttctgaagcaggtagcaatattgcgagggaaatttctcttgcactaaccgttggatcgagcttaaaccttgattaaaggttaagcaaatttgttaaaacattctgacagtttggatcattcattgatattttttaagattgagtattttaactgcaaacaaatgtgatcagaattcctgcactattttgttttgtttcggatggtgatattgagaaaatgttatctcttttctcaaccgtggaattgtcgtcaaatttggtcgtgtgtttctctcttgtagtacttcaatttgaccgttggaatttgtgagttgttattactagtggtagaaattaattttcggacagaagtctattttgtatgtttacctcttgtgatggtttggtacaacttttgttaagttgtatgttgattgtaatggttgctggaaaccttttataatctcactttattgataataaaaaatttgagtgaactccgaaatcagtcccgtgatttttatttctcacattgagaaagtttttcctgttaaaaattgtgttgtgttacttacataattattatttgtgcataaattgctttacttgtgtaagactattgataacaattcctaaaaaaagaaaattgatatctttttcccaacattttacatagtgtttgtttaaccttgtccatgcaatagaagaagaagtgacaaaggtcatgataatttacgtgggaccgtaaaaactaagaaaggtgagcaacacatagtgatcatggtgtttccaatgagtgtaggccgggttgacagaagttgcatctccttcaccaatggtggcagtaggacaaggagtgtcgtcactgacgtacccatagatatcatgaacttgtaggagatatgagtggtttaagtgtgcctggtgtggtgattgacgaaactgagtttgatgggaagggtggatgtggtgggtagttccaaaagtaaggaagccatgggtaggatcgagagaggattgtgaagtgataggttaatccaataccatatagaagacaaataaattaggattttattgaatttcattgtattgtatgtgtacaaaagatatatatattacaaaggaatagcaagactctaagttatttattaaattgtttataacttaaattaaacttgaatttaaattacaacaaattaaaagctaaagttgaatttgtattatgatgtcaatagtccaataaggagaacctaaaaaatagctagttactactagtaaatataaaagttttcaaactagaattattattggtatgaaatttaatataattattataaaattcaataaatgtaaatattagtacttctataatgcgttttttttgcttaatgatatttttgtctctcaagtatcacaatggtataatttaatccctattggtgtgaacattatgagatggatcagccatggaaagtaactaattaccaatgagttaattcttcttaggtgactcgttcaagaagagactgtgttccttaattggatttatagttcactccaaaaaaagttttatagcaatcattgaactgaagttctatgctacattactcttgaaattactataaaggaaaacgataatgaaaactgtaaataaagtaataaatacaatatagataactaaatgataaatttgattgatttagtcgatgaagatagatgatcatatatgccagtagaagaacatacggtcactttcaaaactgtgtcgacaaaactgcccacaattatcttacggtcactttcaaaaatcaatcacagtttggtagatctgatgtccaatgaagaacatactataaacttaacgatcaagtaattaggctccactcaccgatgtatctggtaaaaagaattaaacatggcaacgggacggggcgggtgcgggtattgtattccccgcccccgcctttaaaactcgcccccgcccccgccctcatttcccgtcggattttaaaatccagacccatccccgtccccgtcggagtcgggttttccctgccccgcgcccgccccacccctactattaattaaaaaaataaaaataaaaaataatgtggtttttcttttgaaaaaaacggaaaaaaaagttgactaggtaacaaaaaaattaataacaaacccacattcaaaatatgagatcataatttaaaaattattaaacaaaatcaatcaatttaattaaaaccattatggatctacatattgaatttctcccaaaatataatatcatttaaatatatattgttccaaaattaaaataaaacataacaaagagtagaggtccattgcagcaacaaagcttccaaaatggaattaattcagaaagtcgttggccaaggttcagcgccgtcgagaatgagaaatgagggggagggttagggtttcgggattttattattatatataagggtaaatttgtaatttaattatggcggagacgggacggatatcatcaataccaaacccgtccccgtccccgaatttttgtcgcggggcgggggcggggcgggtatcatcaataacaaattcggtttttccccgttaaaatcggggcgggttttgatgggtacccacaggctcgggtctcgttgtcatgcctaaaaagaattaatgaatttagctttctctaatatatatactcactaagagtgtatttaatgaagaaaaggataacttaaatgtccttctacggaatgtataagatgcatgtacaaataaataaataaaagaatgaaagaatagatgttcaataaataaatatcgtgtcattttccgcaaaactgaaaatatttaactaacattatattatattaaaatatacttaactaaatttatatattttgaaatatacttacaaatttatgcatattatatatgaggaggtattaaattatatcgacgtatttttgataactattttataacttgatataaaatttgatctatattgatataatcgttgaattatatctacatattacaaagatcatttgtattaaattttgtcaaaattgaacaataataaataaataatcaaatatatattagtatattctaaaatatttatattaaattgattataatctaaatgaataatgtaacaaatgattttgaattaatattaaattttgcatatataaattttcaatccaaatataaattttactaaaacattattgaattaaaaattataaaataatctaataattatcaaaattaaatgaatataatttgatttctaacacacataaagttaatatgttaaagctaaatgttaatttgggatttgataaattatatatattatcattagtttgtacaatatcgttaataactccgcacactagatctctatagagagaaaaatagtacacgacgctgagtttgttttccgatgctctctaaatttgaaaatattccggagacagcggttattaatactgggcagtccccacacttttgagaaaccttttatgttaaatttcgaaattgtacagttaggtatttttaattttgagaatttatttatttttatcaaattttgatttttttttatttttcactattattttttacattaaaataattaaaacgaatgccatttgattataaagtaacagagaatttttagaactaaaatgtcttataaccgcaatcttgagaactaatttgaagattcactctatccaagagatacttctgaagaggggtggcatactagcatcggaatacacccttaatcatatggaaatatatctatttagcgaaaaaagttgtagtcaatttttatgatgtttaaaatttatttgagtcaacagcactcacacattattaattagtgaaattaatctctcatcaggtgggttgggaaatacttatagactctggcatagataaaaaaaaatattcattcagaattattacttagcctaattctttgtttgtttgcaataaaagagagctgaaaaaaataaacaataaaataaggtgtgattcatatttttacactattttaatttaaaattttcattccatttcattttattctaccaaaatcaatcaatttttattctgttgtagttgctagattgattcctggacactaaaatatctaagaagggtttgtccatcaagcaaaattttaccatatacccttaccaagtaaacacagacaggttagaaaaaaaatacataaagcatgtaacaaattaaaaaaatcagttgccaaaatgcaaaataatattaagaagccaaaccagccggccagccagttatggatagagtaaaagagataaaaacaggtgtggaaatatgcaagtgactcaaacttacacctgacccacgttaagtttagtctatttagtaatctaattagattaagaattttttaataatctattcagttaaaaaagttatgtttcatgttattaaaagttgtttttgatcttaaaaagttggccggccggattaactaaaaatatgttattatttttatttttacttttgttgacttgtttaaatgtctcattaatcttgtaagattattgacttatcaacttatttaaaagccgtttaacgaattttaatataagtttattgacatgcttgaaacttattctaaaacaggtcttttatcaagttttcaaagttaaactaaacctcgaagaaataaatatgatcaagccataaaatatatgcaaacatcaagtctataaaatgtaatgattaaaaatagacaaattttttaaacttaaatttaaaagagttcatagaaaaaagttcaaaacatataatataatcaggtatatgtcttgaattctcaatttagttcttatgcataaatatttaataacatttattaatttctctttattcacaaaaacactaatagcttgatttatctttacatatttttaatttgatctctatacatgtaaaatatttttaatttagtctctatatatataacgtattcttaattttgattctatataagaactaaattaagaatattctttacctacaaagatcaaattaagaataaataagagaattaacggtaatagagatcaaacttattaaatcggtaatgtttataattagcactaaataacatggtatgacatgattgatagatgattttttgttaaatatttggtcacaagtttgatcacaagtctatgtctatgaaaaaatatttgttgagaaatatttgtcccttaaaaaatgtactatgaccaactccataggtttttacttataaaaatgaaattgagaatttgtgatatatatatatataggtattatatatatatatataggtatgacaacggacaagacatgggtgggtttagtctccccccgccctcaacatcccaaaccatccccactagattaaaaaaatttgacccaccccacctctagttgggtgttggattttacctcatcgacctcattcctgaccttggagaacgagatgaagtagcatagaacaggcctgacttcgccgagaagcagcaactatgttgaaggagaaaacgacgtgatgaaggaggagggtgcaatcgctacaatgaaggagtacaaagaacatcatgatgaaggaggcagagtgtgaccattgtggcagaaagaaacaagcatgagcagaatgacacgatgaacgatataatgcaatggacgagatgaaggtgcacaaagaacaatgcgatgaaggaggaatgcgactgtcgtggcacgatgaagcatgcatgggtaaggtgaacaacacaatgaaggacacaaatctatctgaagtctaaaagtagtgagagtgaaaagaggcaacataggtttctgtaaaaaaatatatatatgtacaagagtatattagtactggggtaggtgcgagtgcggaacacagatcataatacccaatcctgtccccactcccaactttctcaagtggaaaaaacctgatccagatcaattcaatttttctctgtcaaactcaggatggatgcgggttggtccacttgggtgcaagtactattgtcatgcctatatataagaattaaattaaatctttaacctaaaaaaatatttcatcaaatgtgaaatatacactattaaaccttgtagagatataatgttgattaggtagctaagaaagagggaaagaaaaaaattcacaaatttgataccttctattaaaagaaattaacaaattaataattaacctttatcaataaaaaataaaattaaaccttgtatttatttgaaaacaatatgtgcaccggtttaatttaaaaataaagtccaacatgacatccgtttgtagcggtaagtgcaaagtccaacgaaaaaggactcagaaagtgaaatttaagaattataagaagcttccaggaatcaagggtcaagatcatgtgactagacccataagacaaggaaaataacccaaacttttatgtgtattttaattatttttttgtaccatacatttttattttgtttgactctctttctttctagctaccacctcttttcacacttttcccctctccgaatcatccagaaaaccactactttgtgttgttttccatacacactgtgctgcgggtcaaggagacattttttttgtgcactttcatggtgaccttgttgtgggtgttctctgaaagcttctgtgtgtgagtgacacatctacagcaactgcaatgataggtttcagagaaagagaaaggacaagagaaagaaggcattcttgggctagagtcgcaattttcttcttgtgggtcatcctagttttttctctaataagcttgtttttctccatcaacaatgaaagcaaaaccagaaccagaaccagaaccagccattcaattcctccaaaacaacgtagtttcagcaggaccttgtttcaaagaagcaccaccaccactaaaaaaaccaagcttgttgtgagctcaaaaaatggtgatgatcatgatccacacactgctaccctttatggagatgagaagagaataattcacacaggtccaaaccctcttcacaactagtgtagtagtggcaaattccatccacggtagaaggttaatttaattttgtatgctagtagtgtttaaactttaatgcatgatagttattaagttctagtgcatatcaatgtaatccatccaatatccctatgttgttatatcccttatttttatttttatttttatttgtagcctttatcttacattttgcatttggaaaaagaatgagagcatagctttagccttttcagttagttgggagaaagaaaaatgaagaggctagtgttaatgctctcgtttcttttgcagtaatgaattttccttcttttcttttctgtgtatccatctgtggaaaactgaaaaccaaagtgtgtgagaattaattgccaagatctactactcttcttcttctggtatcgattaattattttatcatggccacacgatattaactactctgaatgagtactgaatctgtaaccaatattgtgatccacatagcacagctagctaataagtacaaagtacgctaattttcacagttctggacaacgctgctgctacaccattgattcagtgtctgtgactcagttttgtgcggattttcatacattcaaagtcacgaattaaggttagctacagttctaagatggattttagtaatcattctctcacaaaatagtagttcagtacttaataaatattttattattattattaaaaacaagtacgataaaacattaaattgtaatatagtagtattttttataaaaatattttaggtttcaatcttttatttaatttaaccatggactttaagatcgttctaaaatacactgtagggaagatttgaagatctcatatctaggaaacatcaacatgtttttccagcttcaatgctagtagtatttttttaggttgcaatcttcaacgttaatattttttttaaaaggaacaatcatttacagtatgttcttatttatatagcaaaactatacgtgtaaaatcatgattaaaaaatcggtcagatcactgacactgcatttactatgctcattgtccaattattattattaggcatcgttagctttccttacctcaaaccaaaaacaatagggctatcatcattataagagaaattcttaggtatatttggagcaagacatttttcttattctaatctatttattattagttatgtcaacattgtgcgtcattgttatttcttatattaatgataatttttaatttttctaggtagattaatgacaattttattttttctagttaaattactgacatgacaattaataaatggatcagaaaaagaaaaatgtcttgcttcaggtgtacttaaaaatttctctcatcataattgttgtccatcgcataacaattaatccttgggagtttatatgaataaatttaaataatttaaccaccttaatacttcttttaattagtaaaattgaataaaaatcaaatgttttattgaatataataaaatgtacaaaaacgaaaaacgatcgaacattttcttaaccatatatagataaaatatttaatatccaaacattcaaaattactattgaagaatcctgaccactggatcggagcataagaccatgatttattaattatccacggtcagtgaaggggttaatgaaaaacatgttctactgtggtgtaatagaagatgtgagacagtctaggcattaattattgggtgaaactaggacttctttgattgattattcctagaagttcccatcggtttttgacttaaatgcaccgagttttctcaaacaggatgcctgtctcaatgtcccaacacgctttctcaaggtttaggggactgcaaaactctaaatcaaatgaatattaatttattggcataaaattttgtataaagccttctccttgcatttatctatatatccatatacacagtggcggagccagtttctaattttagataatgtcaaattttaagtaatactaagttttattttttagatagtgttaaattttatttttaattttaattaattatataagtatatataattattaaaaaaaaattcattccttaatataattgtaaatttaattttttaagctagtgccaaaatccttactggttttaaggtagctccgcgactgcatatacaatcttccattcatatctattctatggaacactaatactatggttcggtatttttttatacaaaaactaaattactagtggtttagttaagaattaatccataatcttttttacattattatttttataaaatgcttttaattatgagttaattagctttctaagttaaataaatactgtattaataaaatgtcttaattttttgaaagtctaactttgtcttatcagcagaataaatcttactttgnnnnnnnnnnnnnnnnnnnnnnnnnnnnnnnnnnnnnnnnnnnnnnnnnnnnnnnnnnnnnaaaaaaaaaaaaatagccatatgctttattagagataaaaagaattaaaacaaatatttatttatttttaaaaaagaaagagaatatgcaccattattgttagggatgatttttgaaaacatataaggttagtaaaattttaatatttttaattaaattaactagttttttagttcttgtaaattaattaattatgtcttcttgaaaagacccgagtaagtattagatttcctttatattaatgtttaacattaacataaatagactaaaaatatttaatggaagaaaaatatagttatatttagaatacaatatatttttagttaatatattaaaaaatatagtaatatataaattaactgaattttttaattcataccaagtgggttgaaagagtcttgtacatacaactagagttaatacatttcataaatgaggcactctttctaagaaaaatacattactggcctttccccatttgatcaatgagcctacaaacatccttgtgtgttggggaaatcacaggaccatttttcagaatgctccacacaggaccatgcatgctctctaaacatatatacatttgttagtatttttctgcctcacatatggacaaaacatggttcatggtttcaaggtgagagtgagatatatataagccacggaaacttccttggaatgagtttttttcaacaaagttccataaaaccccaccgaaagaatggctagagaagaggggtgggggactagatatttatcgtaaatcctaatacaagttttctgttcattttttaattaaattctctgttcaagaatgagatactttattctcgctctcacggcttctcactcttctttacaaggggaatggagtttccccatgaaatgaatgtttggttggacctttggagctattatacagcatctacataaatgtgtgacttaaagaggtagtgatagcagtgcaactaccttatctctcactttgtccatcttacataaaacagcaacttagtttattgcttccaacaccctactctttgcattactttctttttttttttttaatttaattcgtaaaaatcaaagacaaatacttaaaaatttacaacaattcacacattttaaaacaattcacacacatcttaaaagtaatattttcccataattagatgtcatgagatataaaaatcatcaaaaataaattttacttctttcaataaagtatttaccttacacatggccggaaaagaaaaactctttactttatgtgatgatgttacttagtgagctaattactatatccaaccccctctcccctcctcccacccccaattaggagggctggcttctgcatgtcctgagggagcattttggtacttgatgtggaaaagccataacccataaccaaaaatgaaggtcccacaaaagatataaagttagctggaaagataattctataaataatatcaactgcccaaaataaaggctctataaatgtgaatcaatgagggtcacattcatacaactttgcaatgatagcttttaattgatgattgatttcttgcattgaacatgtgattacattcaaagaaatgcttgccctctaagttaatttcaacagatttaatttgaatctctcctttcacgggaatgttctaattgcagcatatacgggactgggggagttaattactagcacttctctcacagcatctatggtacggattttataatgtgattatcaaagcaagcggcaacatcaggaaatgtaggtaaaccatgccctaagaaacgtgatcgaaattttaaataaaagtctcaaatttgagttttatagaaaaaaatgcgatttgtaagaaatattttactaaaaatagtaattaatttttaataaaaattaatcattaatgagacagaatgacatgatgaaaaaaaaaaatcatgacggaaagtggaaattgtaaagtgtatgggtatcccgtgaaagttggtttttaaagtcagaaggaatagatccagagtttgaccgtgacattttggatttaactcgtttattaattatataagtttatatgctaatgttacagttcattgtgtctttcctccaactgtctttgttcaattgcaaaaattgtataccctactgaagctactcatttcgtataaaaattcaattcatagaccccaagtggtgcttctatgaataaaattaataaatataccagacaaacatttgttaatacttatggttgttgttaattagtgtcattagaatattgattaaagaattaattttttgattgtggaaattatagaaaatcataaaaaattataaacaatacaattttgcatatctcaataaaaatatttttttaattattttaaccaatatcctaataacacttattaatattttctaactcttaatactattcttttagtgagcatgacaataccgttatgaatttattacctcaaattgtcattttggtatctgccagccaattcaaaggttattattggtgacaaaaaaatatttttacaatgggaaattttttggcctccaattggaaaatgccatagatacactacacatggagtttttttgtaaaaaaaaaattacaatttctagaacagtcttaaaaatactatccttaaaaacgattttacaaaagaatcgtctgaaatgtacattattttattttattttaatcaatgtacttaagatgatttctagacataactgtcttagaaatattatccttcaaagatgattttgacaatcatcgtcgaaaattttcaacaacacttaatataaagacgatcttaaaaccattattaatagtcatttaaaaaagttttcaaaagttgtttttatagtggtgagaaagcatcaatataataggccattcaatggcgtagcctctggcatattggaaatggagccgaagttttgtattattgtatatatggcatgccaactggatccttagcaaaaatgggttctgcatatggagcccatgctagggccctgttcgtaatgcctgcagaggtttcaattcttattgagaaggacactaactaggcactgggatgaacagctcatagacgagttttttttgtttttggaccttttggggcgagccaaattctgcagatgcttctgacacattctgtgtgtgggtctagtttattttatttgagagatcaactacagtactttttaagaatgttaacaaatacttaatgctagtttttttttttcttttctgccagcatacttctgtagttaagaaacaaacagtataaagtttttttttttatatgtaagaatttaacacattatcaataattaatgatttataacactcacacatcttatttaattaagagaactaaattctttaataatttcttttatctataaatattagttgttagtttttattagtgagaaatttaatttaatgatgtttccctctcttctttctccttcaccacttagtcaatattgtattttcaataaatataatttttttatgataaaaatgatgctgatgtaaatttacctagttttttttgtatgatatcttaatttactgtgatttttttacacatatatattgtgagttttaataaaaaaaatatttattaatttttaactaatatcgttagatcactcgttctcaaaccactgaatgcatggatgaacgagtatgcgactgttcaagcttaactaacagattcgagttaaaatattttgatatgtaaccactctgccagacagtgccatgatcgacaaaggcatcagtgtttgatgcctaatataatctgtcaaagctgaggggtgttgaacatgctttggcggattgataaatttaaaaaataaaaacataaaataaatacgtttttttgtctttttttttttttaaaaaagtgatatttttccaccaaaagcatttaaatgattgaaatacaattatacaaatacaactaatagacaaaataacaaatatatcaactaaaaataatcgttcaaacatctaaatttaatattatcattaaaatgtctcaaatatataaataccatttaaaagtcttaaaaaatcatactcttaaaataaaatccaatcatccaagcatttattatagttcaacaccataaaagtcttaaaattaaacatacaaaattgtcaagccaaaatatgtaattgaaattattaattattaaataactaaaatatttaattctaaattatgtcatccaaatttcaaaatttcaaaataaaattttaattatcattttctttaaataaataatattattctatttttttagtggattaagtgaattaacttgactcaaatctatctaatatgcgagttaagtgaatcagattaaatttttattattattattattataaattcttacattttagaatccaatttgactcaaacctctaatgaatcggattgactcattggatttaagctcactttgataagcttaaggtctataggtgtaccaagacattcaggtgttttttgtttgtgtggtccgaggtgtttgacttgcaagcccaggtaacatttcattcgaataaaacagaggtagtgtaatcgaattatattccatcattttacttttgaagttctttattttcaaatttgattattcttattaattggtctcgtcttttcaaaatatatatatatatatataaacttttaatataaattgaaaaaattaatttaatttattattattttaatctatcatttttagatcaaacttaaatttgtttttttaaaattaaatatcaataattaaaataataatatatcacaacataaattatttatcatctatttaaaatacaatttatatgttaaaaatatttacttatttattacatattttagttatcatataatttatatatttataaattagaaatatttatttattatatattataaattttagttatatatagtaaacatttattttgtgtaatgtaccagctaaaatgcaagtctacattatctataaaattgatgtagattgctgtagtaatcccccaaatcattctatagacaattttgaacgttcaattttttaaaataatatttaatttggagcaggtgcaattctactatttgaaagttaaaggtttttaaaataatatttaattgagagcaggtgcaatctgcattttgaaagttaaaggtttttaaaataatattataatagtttttattatacgaatgttaaaatatttttgttcttatcatgtagtaccatttaataaaatagaaaaataataaaatacagcactgaaaatatataataataaaataatgttatnnnnnnnnnnncttttttttttttactggtgtcacattcatctaaattaaggaaatcatagatgcctgaaattttcagtagtttcatctaacttctaagtcactaaattttaactgataaaaaaagtcactaaatttaagtactcattattatttttgtccttattttaatattatcctttaagtcatattttttttttaaattttgaattaatgtgcatgacggataacacttttaggtatttatatgaaattttcgtagtttcagaaactaatgcaacaatgtcatacactttcaagaattaaaatgatatatagtttactgtcagagtaactaataaaattttattaatcaaaagtaataacgtaatataataacaaggtaatcaagggcaaatccaagaaaccaagggttgattaattttttaaaataatatttaattgggagaaggtgcgatctacgttttgaaagttgaaggtttttaaaataatatgacatttgagccacgagaaaagaaaacaaagataaaacaatgtttaaggtgtgaaaaattacaaccatttgagcctctatataatattggtgtcttgtatgctcaaacttgacaagccaatgatagttgtggctttctaatatttaactgatagttgtatgcaaatattatttgaattcaagaatggctcaaccagacacgttggtggctgagattgaggtgaaaacctcagctgataacttttacgactccttgaagggtaagaaacaacatcgtgttcatgatattgcacctcatcatatccataaggtggaagttcatgaaggtgagtgggataaatctggcaatatcaaggtgcttacatttgctgttggtaagtaattaaacttaataaacactattcacaactatatatcttctattctatattattgtcattattaatttattattgttattattgttgttgaatattatgtaggggacactgttgagaccttaaaggagagagttgattttgatgatgaaaacaagaagataacctacaccatattggagggtgacatgttgaagtactacaagagctacaaggttatccttcatattttaccaaaaggtgatgagcacagccttgtgaagtggactttcttgtatgagaaggtggatcacactgctcctgagccaaccaagtacaaagatttggtggttaaactcacgaagaacatggaggctcatcttgttgagtctcgttaaaatgatccctaagtggttcatgctaaataaagttgtggtgtgttgcatgtggccccttagttaattatcaaccataatgtttgctttaaattatggtgtgtaatatgttgttggttaacttgttcaaaatattggttatcaaccgtaagttgtgtaatgtgttgttggtttgtacaaaatattggccggggaacatagggagggctacatgccttcgtatgtctgtgatttgtaatcttcgaccagctactgattaattgatgttatgggggatttatccttgtttgtctcaaacattttgccaaatacttttgataactagaaggtttgtggatagccgatttttcttctttgggaagcacacagacatgcattggttaaaaaccagaagaaattaaatgtcaaaatgcttccacaaaagttgttcaatttaaatcaagcacttgaatatgttttaatccctgaaaaatttgcagtttttgcatttgatatttaataatttttttcttaacttttgattcctgaaaaaaatattttatatttgattcttgtcattacattagctctattaacttgagagattaccatttgatagaaacatattggcggttgtgataaaaaaaaaatcaatgatcaaaagaaagatttaaaaatgttttaggaataacttaacatacctaacataatgaaagagacgaagtacaaattaaacaaaacattcaggaccaaaggcaaaatcagaaaaaaaaatagggaccaaatgcagaatctataaaattttcaaacaccaaaaaaatgttgaagtcaaatttatattacaattttagtacaattgtggagttactgctttgtaattttaaataaatttcaactccctttccacgcatggaaaagttatacaataatcactctgaacgttgcaattgacatgacaattttaataaaatggtctcaatttttttggtccaacgtgtaatggtacaactccaaatgtggatgtactatattataaatgaccttggttggaaatgaaccggtaccacgactgcaaataaatgaacggattgaataatcgtataaatgaattggacatcacattttaatttaaaactttaagatttagatttatggatcttctgctcacttatataatattcaacttatctatttctatccgatgtacaactttaacttctcaaaagctgaattaaatgatgctgtttagtagttttccagtaaaagatcatcctataagtaaataaataattgtacattactttgcaatttggtttaaaaaaaaatctgaaatcaaccttttatcttttcttaaaactggttaaatgtcaagcttatttaatattgtgagttatcatataccttttaactctgtcttcgattctcatgtaataaaaaagaaaaaaaaaactggnnnnnnnnnnnnnnnnnnnnnnnnnnnnnnnnnnnnnnnnnnnccccccccccccccacccacacacacacacacatatatatatatttggccaaagtagactagtgacactttcttcctcttatgatggcaatgttgtccccttactaagtaatagatcatactaaaatctttcagaggacaacatagagtagttacctgcaataccaattgtctctgatccaattgcggagtttgaactgatatatggtattcagaagcttataacaggaatcagtaattatgattgaaatgttgctttgcttacctaacactgttatacgtttttattttttttatggatacactggtatactttttatactatgtactcaattgtagttgtatactttcttttccttttcttaaagattatgttacaataattcacttaaactactataatattgaaattatacagaagtttgagctttgatgaagacttcaatctgcagactcccagcatttatattaagcattgcaaattaggcttaggagccattttcagcaaacttatcaacttgagtaatgtcaaggaatgtatgaactccacttgctttgaggaacctgcaatgattgaataagcaaattaaatcagctaacaaaattaaagccttcaaaaatgcttttgaagacattatgtggcaaaatgacatactcatctctaaaagctcttgccatagacaagcaacctccccgaacagatgattgcaggttcacagcaatgtttgggttgtgaatactctgcctcatgtgaacccaaccatgttgtccatgctcatcatttgatacttttgccctgaatttgtcacaataaaatcagttttgatgagcacaacatgaagaaatgtaaaatcagatttattgaagtgctgcttgaattttctttaactttattccacctgtacatttgagcatcaatgggagctggggtgtcatttgtatctacaagacacccttcactcacccaacaatcaccacatgagtctaactcccaccctttaagcctcccttcctgtatagaaagaaactctttatgttttgaatctttgataaccacaatgttttcaaaatatggagcaaggttttaaaaaaacaattcacaaagccaatttcaaggattttttggaattattgtgactggaattgcagctgcatctgctgcatttgtctgcaatttcatgaaacatcaaggatcacaatgaaaccgtgatcatgcctgtaatttaaacctcaatatggatttggattataagattagaagtgctagcacaatactcttcaacatacttttactaacattctctattactagtaaaaaaattattagaaaccataaaattacaagtgaaagttcattaagggtgtgttaggttgagggggagaggagagaaattgagaaaaaattgtgtgggccccatgtgagtctcacacttcttacactctactctaattcaaaaaattctcttctatttctattttttctattttcattctctaaatcaaacacaccctaaataagaagtgagatccatccaaatttgggattttcaagaaattttagtcaataataaaaaaacatatttaaagcattttcttataagatacaaagtatacctcaatgtaatttctaaatatttcaatagcctcggttcctttggctttagcaagtcgaggttcagagatgatatttatcctaagttccactgattcatacggttcttcaagatcttctataagactaccaatcccttcctttgatccagcaagcttcatcctcaccatttcaattataatcttcaccaccatataagccccttcattaaaaaggcaaaaacatcatcaataacaacatggtaaatcaaaacaatgaaccaaaaacattcatgaatattaactttaaccaaccatcatcaaggaaatgattttctttgagagcaccatgaccagatgtttccatcataagatgtgtttcaattccatcattgttaagatgaactcccttgtcaatgacatttctgtatccgacacggtataggcaatggtgaccacctctatcagttatgaatctagtgagtgccatgctagtacgagcatcagtcactatggttgatcctggatgttccctcagaacaattgcagacatgagagcaatcagcttgtcaccatttattggattccctttactatcaaccacgccgcttcggtcgacatcggtgtcaaaaactattccaagatcagctgagttttgtagcactgctgctctggtgagtgccatggcagttttgtcctcagggttgggaatgtgatttggaaacattccatcagggttaagatgtagggagccaaaggtatctgcacccagtttgtctaacacatcccatgtgaagaaccctcctgagccgtttccagcatttactattatctgtaggttttgtttcattgcaattgaagtgtaaaattttcaggacataatgtccaatacaatgagaatagaggataaagacttaaattaaagcacaacataggtgatgttttaataggatgacagccctgtatatgttataaactaagacaatcaactatgctcacatttccatttaatttgcagtaattttttattattttgttagaagaattttattagggactggatgaattgccctaaatatttcatctttttagactcatccctggtcagaagttaaggactaatctatttaaggggttaagttttccaacaaatattctttcatacatatgggtctgagaatccaactcctaactatatgttcaaagaacatgattatctgccaatcatactatactatattgataaatagtagtaaatattgtagctactaagagcccaatgtaaaggataaaatgagggtgaattagaatataccccagagaggcatgtgtaacaaacaaacaataaatatttatatatattatattgtataattagtccaacctgaaatccctggagtggagtgtcataatgcaaaggatgattgattctctccttgatgatttctcgtaggtgcattgagtaagtgctcataaaatcaacttttgttggaagaacattaagcaaagtagacaccttggccatcctatttgcatatttacgagcagctttttcacatatttcctccacctctgttgaagtcagtccacctctctttgtaaaaaatttcagaccatttctggtgtaaggcaagtgagaagctgtcatctgcagcacaaaatgcataattaatttgcagcattagtattagtcctaatcattgtgacacaaccatcacatctacattataagcctccaaatattcctataaatttagttacaatttgaattttttgttagtttataaatttcaacattttttatccctaggaattgaacatggtaccaggagatttacaatactcacacaccttacccaactaactgaactagactccattggttataaatttcaacataaagtagcactaggtcactagcaagttattgctattataaactttggtaacctaccatcattgaagcatcatatgcaaatggaggcaacaaagtgctcatgaaacaagccggtgtggtggctagtcccatatcatacgtcatgcaaccggcgcgagccagacctgcaaagactgcgacgctcaatttcaaccctgtgactcgagggtcgcgcccgagagacactctaacattctctacagggtgtcctttttccttctttaaaccattgataatccactctccaaaactctctgatattgcctcaacagcaggaggagtaaggtcaactgttctgcctttttcaccctccaatgccactcctctaacatctgacccattctgaagccttctaatcttgtccaactcttcatccaccacaacttcatcatacttcgccgtgccaatggatttcacacgtattgatttattgaacggaaaagaaaatgagaaactaagtttggtgtgcagagttttcttccctggtgaagaaggaaactttgttttgtgggagttcttatgcaaagatgttgtgaagtttggagaagtagaagcagccattgcttgttttgtttggcgctcttgccttgtttgaataaaaatcaagctttgggagataaggtaaacataatagcattaaaccataaccttacaatccaatatctcaggaacaaaaaaaaatatcttttaacaaacttacaaactcccaagatttttgtacatctttttgtctatatgccaattatgttgtcactaattgatttattagttgcatgtgatatctgctgggtagaatgagcacctggtatattcttgcatattactacaagtgtatgtttgtcattacgcactttgattattcaaacacaattgctgaccaagtttgtggcttgtgtcaattgaaataccaaaacaatttctagcagtaagtggagctaaacgcgccagaactgaagcttctccttacaagttttgaagcaaagactcagggattgctcaaatattaatgaacaaaatccttatccctctatagagaggaaatgcttgtgttctctgaatctctaatacactaattaatgacacgctctgtagaaattatatgtagcgatatccagtgaagtcatagaaaggaccacaagaaatttggatcctctcctgtttctggagaaccatataattaatatctacttggtagtggacacgtgtttcatttttctaaatataagtttagggtcttacacgcatatttatctgtcaagacaaaccatataagaaaaatagaaaatgcatactgatacatttttttccagaaaaagttatagtagtcatattcaggtgatggtgagttaagactaagggagagattcttttatgtcatggatgtaattcattcattctattctccaaagtccaatgtcaagacaaaccataaatgaatgaatatattatattgttgagtgattagtaacttaacgataaatcataataaannnnnnnnnnnnnnnnnnnnnnnnnnnnnnnnnnnnnnnnnnnnnnnnnnnnnnnnnnnnnnnnnnnnnnnnnnnnnnnnnnnnnnnnnnnnnnnnnnnnnnnnnnnnnnnnnnnnnnnnnnnnnnnnnnnnnnnnnnnnnnnnnnnnnnnnnnnnnnnnnnnnnnnnnnnnnnnnnnnnnnnnnnnnnnnnnnnnnnnnnnnnnnnnnnnnnnnnnnnnnnnnnnnnnnnnnnnnnnnnnnnnnnnnnnnnnnnnnnnnnnnnnnnnnnnnnnnnnnnnnnnnnnnnnnnnnnnnnnnnnnnnnnnnnnnnnnnnnnnnnnnnnnnnnnnnnnnnnnnnnnnnnnnnnnnnnnnnnnnnnnnnnnnnnnnnnnnnnnnnnnnnnnnnnnnnnnnnnnnnnnnnnnnnnnnnnnnnnnnnnnnnnnnnnnnnnnnnnnnnnnnnnnnnnnnnnnnnnnnnnnnnnnnnnnnnnnnnnnnnnnnnnnnnnaattattcattttattttacaaaatacccttaattattttttctgttcaataaataataaattaatttcttgagttctcttttcataataaggatagggaagattgctgatcaaaattctctgattcacattgttttttatatacaatacaaaagtcatcatcacttaagtagaggaacatcaattaattcatcagacggaaagagattgagattgatgtatcctcttttgcatcatattttagcattgttttgggctattttttttgtttcattatatcatagttttcttaatttgttttgtattgtattaggttgtgtttttgtgattttagaaaatattgcttatcgaatgaactagagcacgaggaagtggatcaatcatatcttgagatccaataatgtgattaaagtgatcttggtgtctatagaaaatttaaagatctataattttcatgaagatactttgatccaattaagcatggatctttaacacaatagaatgttaaactcaagactaccgataaaaccggaaaaatcctgcataagttaatccacgcacaccgtggttaagagagcaaatttcactatattgtaaatgtttcctatttgaattaagatttcatttcttaaaaaatacattatacttgtagtcttaaccaaaaaatactaaaatttattttgctacttttttatgtatttaaatcgtgtgtttgtgttaaagttagacattcttgtttgtattatagtgagtccccaatcgaagtacttgattatgtgaaagactggtctcgttaatgcctcatcaatataaatgatattgatcatattcgttttcattacattacctttacctttaatttcggtaatcattttaggctcttctacttctagtatgtatcatcgctatttccagcaccgttctataagtcaaagtacatgcataactaaagcaacatgatctgctaccatcttctcagtatggctcgtgatgcacacatctcagcattgctggccactgcccaggccttattcttttaataaaataagaaaaccactctccaagcaactcaatttgtcacatgataaccgattcagacttgaaataaagttcaaagtttaactaattacactttcctcagtagattttataagtaagactatggacttgtttggataaattttttcataagtacttttagaaaggaaaaaaaaatagatttctccataagattaaattagcttatgcataagctattttataaaagctctctcacatatcttttctaaaatatgattttaatttatgcataagataattttagtttatgaaaaaactcatttcattttttatttcttattttcttttcctataagtacttctaaataaacttattcaaacaggtagatcttcaaggataccagaggataactagctatcatgtgattgttattacttactctgttataattagtaggtaactcttattctgttataactgttacagtaggcagttgttgttagtttggatgcatcgttctcttgtagactgcacttgtatctatcgccaatttcaattcaatcaattctagagcttgctacggatcctctcctttacatttacctctgatatgtttccatatcagaaatctagcactagatttctgataaaggtgtctaactacaacctgcacataatagggccgatttgattgaagctacaagctcctttacataattatttttaactgttgatgccttaattttagatcaagctgatggcaagatgaaataaaaaattattagtggacacctccaatctaaatgacacctagtaagaaacagagaaaaaaaaatgtacgtatgatggatgatataatgtgataagaagggagtgatagaaatattaggtgttaatgaaatatttaagtggaaaagtgtccaataatctttgctcattaaatgcctatgtttgtgaggtatgtccagcagcaattcttgagaaatactaaatacttggttactagcactgatcatgtcatcgtaatataaactaaagattagattagatatttctgcaactcactaagttctagttttcactccaaaagttacatagtaacatcaacttatgatgttacgtatatcagctcaagtagtacagcataaagttaaggcatgcacacacacctaaaactcaatttctgataagccctttgaatctggtagattaacccactcaatttccacagttatttccccagactttacatttctcaatcttaaactcatctcttggatgagttttccattcttccatatgcagctgctctcttcagcaaggcagttagtcctatctggttgaaccctcttgactacatggccatcaggaagatcgctcaagtccatcttcacacactgaagataaggctttaagtcgatctctgcatcgcccatgctgtcgtctacagagaaagtgtctttgtctgaaactgtctgaagagaacaacacaattattccaagcaatcatcaatttaaaattaggctattctggtaatcatatatagtctagcaggtagcaaaattactgatgcatgatatagactatttcattcagtactcaccagatgtacgggaatgctaacatcgcttacataaagtgtcaattcttcattccactcaggattagtgctgtctttcacaacaccagttttcagtttctgcatcaatatgagatcaagtcttcagaccaagcaattgagatttgagagcaacaaatagtattggcaaaaagtgaatttaatcattgattaccattgaaaaacaaggttttagattcaacttgacatcgttaacatttaatctctatttgaatcactccttaaatttaaaaaatgcaatagtgatttacttaaaaattagagatacaaatagatcatacaaaaatggtacccactccactccttgaaatacattaaaatgcatgtgcacacaaatttttttaattgacaaatgttagttgttaatttgttagttttttgtcaaaagaattggcacacagactataagacctggatgtgaagaacttaggacctatgaagctctttttcactggctctagtctcaatacaaatccaataattaatcaaggcgcagaataggaaaatataattcatacccattaataaagagtataatctcatgcctctaacctgttcggccatggtgacaaagacatatgggtcactggtacgagtatcacaagctttgagattagtgcctcttttgatacgaagtttgatgagacccagaatgttctccatgccttgtgattgcggagtggaaaagaaatcacgcgaagaagagagtggaaaaatagaagagaagcaactaatgttccttcgcgaaaaaagttacatacaagctttgacgtgtttgaactaaaatctaagttggacagttggcaaccttttttagatgcaaaaacacctagtaccacagaattttggtcccctacttaaggaatttgactgattcaaaaccataaaggataaaaaataaaataaaaacataaggtgaaaaatataattacagggtcaataatatcgttgttggcaagcactagaatttgtgagtttcttgtatcaccgctattctctaggagaaattattagatcgattatcatatcattcatagttttgatcaataataatcatgtaattattcttacatgtatacctaataaggattaattgggttatgttttaatttaaagaatttaaattaattcaaaatattaagttatttatatatcacataattattagtcaaaattatagttgtgaaactcgatcggataaaaattcaaaattatatatgaatctattatatataaatatataactaacattatttgagtaagaaaaattcatctatattccaaaatcaaaaataataattgataataattcaaaatttgtgttaaaaaaaatccattttgttactaaaaaattgtaaaaccgaccagatccaatcgggatccagtaacctaatcgatcgagtttgatcgggtcatcatgagtcaactgcataacaaatccaataatagagtataagactttatttaaagagaaaaaatagtgatagtgtaaatttttttacataatcattcaatcacaacccataatatatgataaatttgttaacttttaaaattattatcttaaaataattcaataataagtgtaattaaaggacaatttaagtgtatagacattaaaactcttatttaaatgtgttattaatttgaaaagataaagtataagttattttatattaagtttctcaatgtatattctcatgacgagaaacaagtgctatatgttgttttccaataacatgagaataataattatattcaaaaatgcttttaaaaatatcaaatacaaattaaaaatatttttaatttactaaaaagatattgctgaaaaaggtatttttatctatcaggaaataattattgactcgagagttcaaaaataattattggcttgcaaagttatattatcgtcaattattttactgtcaaagtgaatcaaatctagttaacttggaaaaaaatgaactgtttcacatttttggcccaattaaatattacccaaatttgactggactcaaaagtaacgaacctgacatggactgtctcacaatgagtcagaccaatgtgttcaacacataattgttattcatacctccctcttttgataacgtaactcttttatttctttttattccaaaaaataccattttgtaatttacacttcctgtaagggtgttcataaatcatcatcagctttcatctatatatatttttagacctagctaatgcttaatgtaccataagggacccaccaagtgctcgattagggccaatcgaccacccacaatgcatacacgtccttaatggacgatactttgtagttaccaatgatcattataaaaaagatgtcataggagaaatgtaagttctattcaatacagaagatattcatctaaatacctatcgacttaagcatcagagagtccatttacaggcatttacatatcgccaacaatagaaggattatgtagaggacatatatcatatcactatatcatccatcaaaagccaccactaacaagatcggtcgaggtagaattcggtaagaacacctaatatatgataatcaaggccctttgtttattgtacattctcaaggtctattctcataatgtactcaccaagagcaccgacttaaactactcctacaatgggttttaaaggttacaccaattttcaaacctgataatcatataaaatttaggatacttgaaaagaagaatctctttgtgcgaacatataaatgtgctgttgaacttccgttttagcgcgcgacatgcacactcatactcttcactgatgcttccttttaacaaaagcaagtttttctcaaaaatctctttatgaaatttctctcccagattcatatcccattggatacataaaagggaagaaaagatggcattgactatctaacaaaagacttctaaagtggtcccaatgatctatatatataatttattcatattcatttgaagttttttaaataataaagattacgcaataaataatatattacactataaagagtactcatatttttcctaatattatatataatttatttatattgaatataatttaaatttaaatatcgaaaacttgtcgatgaagtatctaacaccaaactatatcgattcaaagagccttttgaaacgtaatcttttcttcttttttgttttaatctctttttcagtgagatcacgtgctaggctgggggagatgccatttggtaattagagttaaagtgaaaaactttactgcaacttaaatatctttgttccagatcaaagattaaaaagtgaaccccatattgaagtacatgtgctgattatacaagttgggagaaacgtgtaccacacattaacacaccgtccttctttttttttttttttttttnnnnnnnnnnnnnnnnnnnnnnnnnnnnnnnnnnnnnnnnnnnnnnnnnnnnnnnnnnnnntatatatatatatatggtgtccagtgcattggcaagacaaaaacagcttgattcgattagatttgcaacttacagaaagtgatgtattgattctaatctatctgttttgtcacaatgatttaaaagaaattacatttatagctagtcacaatttgaagcttaaatctccatcaaagtccttcctactacgtgaacaaacatattactagcaaagtagcgtttgaacttacaaagtaaaagtacgaaatattttagacgatactaagtaaccgtgacattttctttttgaattgccaaaaatttatgaaacagaagcaagatcatggtcacaagtagtgccaccaatcaagccaagccaaattacaaaatccaagtttaactttaaaaagaaaggaacatatatgcagtacacatgcacattatatccccatcccatataactacaagtaggaaggagtgacattagcatcgtcattagataaaatatactctacgggaaaaaagcatattgtgtgaattgttgaatatactttatcaaatgcttttattaatcgtacttaataaatattatttttcaataaaaactttcagttctttttcatatgctcacgagtcatgaagcacgtaaaaattataaaactaaatactacatatactcattgagtcattgtttatgtaacgtggattttttctcttaaaacactaagttttaattgcatttttatcttaaactttttaatttttggtgaatttatcctaacttttgaagtagacacattttactttcaacttttaagaaacttacgaattttatctcaatcatattcctattaataaacacaaaaattagaggtaaaatttgcaaaaaaagaaaaagattttggatgtaaaatttgctaaaaaattaaaaattagggataagaagtacaattatgttaggaataaaatgatagaggataaaatccataagttttttaaaagttaaaaataaaatgtgtcaaattaatttgttgaggtaaaattgatcaaaaattaaaaaaagctgagaataaaaagttcaattaacaaaaaaaaataaaaaaaaaataaaaactaagtgattttaatagaataaaaggtacagcatagcagcacaagttgtgcatgctctcaaagcagattgtttacatatagatttaacttataaactaaataaatcaagtcgtgcttaagtttagcttttcattatattataagcttatttttcaattccaatttgatttttttgcttaataaactaaatttatcaaactatataattaatatataggccgagtggatggaagatgatgtggtagagtgcgcccaagcgagggtgagcaccttcgtggaattcgaggttgatggcattgaatgtagcttcagccatggctatgacagtttggtgcaagaggctgtatatgggatttcctgttcgatcatgaaacatgttcacaatcacagtttccgggtttgacctagcaattcgttctattgcattgagggtggctttgttgcgtgattcggagacaaagaatttgcagcataataaagatcgattggtctatggttttcttttgctcctcctacataagtttccagacagtgaaaacttgacacattcaagcagttgtattgaaacaaaatttacatgttctttgtcagattttttaacttagtaattaaccaatcaactgtttgcatgttctttgtcagatttttcgtaccaaatcttttagcactattctaaaaagaaactacaagaaatgaaatactatttttttaaaataaaatttattttgatcataataattaatataaataaggcttaaatatattttttatttttaataaatattcgattttttctaataatttttttttacgtttagtcctaatattggtccttgatattttgatttaattcctgataaattagtgaattttatgtttgttcctaataaattagtgaattttgatttagtcccaactaataataaatgtaaaaaatttatcaatgaacaaacacaaaattgttaatttttcagggcctataaataaatgtcaaaggcaaaaataaaatacttttattataggcttactgtaaaacaaaaattcattaaagagtaaatacaaaaatcagatatttattagagatccaaaagcctaaaaataataatttcttttaaattattagtttattttaaatatcatttcaaaaaaaaaaaactttgtttacggatactgtcatttattctttatgatatatccttttgcgagcaggctagacgtacgggccgggccatttaattttgtgggcattaatatagtccaaagtcctaacattttttttcagtaaaaaaaacatgatttttatgccgtaaaaaaagaatatagttccaaacatgcttgatgggagttttatggtcatggcattcacgtatgtgtttactctcggctttcatcttcatcgttttttggccttaggttgcctgatttgcacaaatggtttacagtagtgttttgttttttatcaaatgattccaaaaattatatatcaatacaagtacccctcatgccctcacccatgagatctttgatatatgaaattggattttttttcctaaacatttttgggggttcatgcttttatactttgtttggttgtgaggagagaaataaaatagataaaaatagaagaaagataattaattagagaaatagagtaaaaataaaatagatttttttaacaaattaagtgatttttgcaaaactatcaaagtatcaaagaaggtggtgtcgaaaactatttacaagaaatgagtgattttcacttttaacataagttataattacaactgatgtcaaaagtcacaatcatttataaccgatgaaaatcacttatctcttgtaaatagtttttataacatccttgattgttgatctctcaacagctctcacactgtaacatttcatgcggtgatatttcgctcaacatctttgttggttagaaccctccaaaggtagctttctccaataccttgaaaatgagtttttgtatgcttcctagatcaatgactgattccacatgttaacacaaaacttttcaacgtgttttgttctcactcacatttttcaaaaaatttcccaataaatcgttcaatcacataactacttcaagtcaagcacgtttaactatgaagttcttaagtgatagacggtcaaaaagtatatgcattttgttgatataggtaatactaattaattcttttaagtcatcttcaactgcataatctcatacatatataatctttggatctctctcattctaatgtgattcaatcggagtgttacaatttttctatcatcaccaattaattcctcattaattaactagtctatcatcaccaattcgtctaaacaaacaagggattaaaaatataatttacaaaaaaaattacatataattatcttattaaacttttggataatgtgataaataactaaatcattattatgttattaattaaagttgttacttcacaactaagactaaaaatgataataaagaaaaaaatttaagacttcgactaatcaaannnnnnnnnnnnnnnnnnnnnnnnnnnnnnnnnnnnnnnnnnnnnnnnnnnnnnnnnnnnnnnnnnnnnnnnnnnnnnnnnnnnnnnnnnnnnnnnnnnnnnnnnnnnnnnnnnnnnnnnnnnnnnnnnnnnnnnnnnnnnnnnnnnnnnnnnnnnnnnnnnnnnnnnnnnnnnnnnnnnnnnnnnnnnnnnnnnnnnnnnnnnnnnnnnnnnnnnnnnnnnnnnnnnnnnnnnnnnnnnnnnnnnnnnnnntcaattaaagttgttacttcacaactaagactaaaaatgataataaagaaaaaaaattttaagactttgactaatcaaaatttatattaagaactaaaaacaaaattctgaaaaagattaatagtttttcaatagattttattttattcaaaataattatgccatggcaatgtgatattataggtaaattaaggtttatctgtttaaataaaaataattttatttagaatttagtgctttcaacattggagaaaatttcatatatattattcaagttttctttttctaagaaacttccataattattttaaaaatttaaaatattaattttcattaaaaacatttttaaaagaaaataaaaaataaatggtacttatatttaagtggtttatatttatttttttcttaatttcttcatatttacgtaccttttctattgttttttttatcacctgagataaatatgtactattatatatatatgaaaggaggaggatcaaattattccaaaaatttaaagttattttttctcttcaaattatttttgaaataacttgatttcttattgaatgaaagatagggtacacgcaatgcccaaacaggacttacaactaacagcacaccacgttaattagtataatctcccacccaaaggaaactaaaccctcatcaaattccaacatcaccatcaccaaacctataatcgaagcaaaaattccaaaaactccaacatcaacataacaaactaacatcaacattacaatatttaggattaagaagccaaaactagatcccacaatgaggaaaatgtgatctcctaagggctctgattcagtccgtagcgagagcctcgaggtcgttgatttagtgcgagagagtggtgtcgaaaacatgggaaggtgattgtggatgcaacgttgtgacagctaacagatccgcgaccgcgacattgcggaacaagtccattatgctcactctacgtttttcttcgaacattctttgacagacggaacggagacacgaaacagaggatgagagcagaacgaagacacagagtaggaaagaaaagagccatgagtgcaagaaagagggagggagagagtcgtaggcgagcagcgacgacgaatggcggaacagagacacacgacattgggtaagagcagaacgaaagaagagacccgcgagtggaagagagaggtaaaatggtgggctatttaaaggggataattttttttacaaattatctactagggatgttttttaaaaaatttatggaaaaagagtaaatcttaaaaaattttacgacctctaaaaagaagatcataaataattttacgactttacttttttaattttattccattaaaattgtataacttcttacgatttctaaattgctataatttttaatttacgactttaaagtcgtaaaataaaatcgtggtaaaatatacaactttatttatattttatttttttaaaatttcaattgggaagtcgtataatataatacgacttcctatttttttttaaagtagaagtggtgtgaaagtttacgacttctactttttttttttacttttatattttaatttaagtttttcttnnnnnnnnnnnnnnnnnnnnnnnnnnnnngttaattttaataaaattattttatttattatttaagaataccataattttaatatatttgtttgatttaatattttgtataattttatttattttgtattcaatataaacattaaaagaaaaaattgttttattttgttatttaattttgtttttttaattnnnnnnnnnnnnnnnnnnnnnnnnnnnnnnnnnnnnnnnnnnnnnnnnnnnnnnnnnnnnnnnnnnnnnnnnnnnnnnnnnnnnnnnnnnnnnnnnnnnnnnnnnnnnnnnnnnnnnnnnnnnnnnnnnnnnnnnnnnnnnnnnnnnnnnnnnnnnnnnnnnnnnnnnnnnnnnnnnnnnnnnnnnnnnnnnnnnnnnnnnnnnnnnnnnnnnnnnnnnnnnnnnnnnnnnnnnnnnnnnnnnnnnnnnnnnnnnnnnnnnnnnnnnnnnnnnnnnnnnnnnnnnnnnnnnnnnnnnnnnnnnnnnnnnnnnnnnnnnnnnnnnnnnnnnnnnnnnnnnnnnnnnnnnnnnnnnnnnnnnnnnnnnnnnnnnnnnnnnnnnnnnnnnnnnnnnnnnnnnnnnnnnnnnnnnnnnnnnnnnnnnnnnnnnnnnnnnnnnnnnnnnnnnnnnnnnnnnnnnnnnnnnnnnnnnnnnnnnnnnnnnnnnnnnnnnnnnnnnnnnnnnnnnnnnataatacttaaaacaaaatttaaaagtgggatgatgtctcacaacgagttcttcttgtattgggacgaggtctctcatcttgtgtaattatgaaggacataatcgtaataactgtccatacaaggaagtcaacgattataaaataacataatttttataatacaaatagtaaacaacaattaaaattaaaaaaattaaataacaaaacaaaacaattttttcttttaatgtttatattgaatacaaaataaacaaaattatacaaaatattaaatcaaaaaaatatattaaaattagggtattcttaaataataaattaaataattttattaaaattaactaaataaaataattttaaaaaattaaacaaaatttagaaaaacctaaaagaaaaacctaaattaaaatataaaagtaaaaaaaatgtagaagtcgtaaactttcatacaacttctactttaaaaaaaaaggaagtcgtattatattatacgacttcccaaatgaaattaaaaaaaataaaatataagtgaagtcgtataataatatacgacttatttaataaaaaaataaaagtcgtatattttgccacgattttactttacgactttaaaatcgtaaattaaaaattataataatttaaaagtcgtaagaagttatacgattttaagggaataaaattaaaaaagtaaagttgtaaaattatttacgaccttctttttagaagtcataaaaaattttacgacttaccccttttccgtaaatttttaaaaaagtacccccaatcgataatttgtaaaaaaaattacccccttttaggtaaaaaagcctaaaatggtgacatggtagagtggagaaccaggtcaaaaacgagagagaggccaccggttcttattttgctagattggaaaatcactgttcacagcaagcttttgtgaaaaaagattaaaagaaataaaaaaaatattttaacgggaattaaatttatgaacttttattcatagataaaataataaatcattaagatacttgttttatttagttaaatatattaacattatttatatatgtatcattagttaagagttattagtttttttcaaattatcaaaatttataaattaaaaaatgtttaatataatttttttaatttttttatatcattttatatatttttaatagtttacatatttttatttttattttaccaatttataattaaatttcataaattaatatgcaaatcattcacataatattttttcaaataaatactatgtcaactacctacataaactccatatcagcatcaatatgtcatatcaaagttaaaatttaactttaaatagtcaactgacagaatgatcaaaagtttttattttaaaaatagggagattaaatgtctggatttaaaaataagagaccaaaattttggatttaaaattatcgggggactaaaattgtaatttagccttttaaagaaaaaagagttcagcttttttatttaaaaaaggtaacaaggttatctaaaaaaaagttaacaaagaaaataaataaatatactgaggataaaagttgaagaaaatataaaaagccggaagctagtgtacttttaatagcatttcaaaaaatgctaaaagatattatgaagctactaaaaagatttatttatcaaataaccaaataaacttttcagttggtaagaaaaactagaaactagctaaattgtcttgtcaaacataggttatattcaacagaactaactgaaaaagctagttggaagatgaaaaactaaatggtagttagaagctaaaaaattagaaactagctgttatggataaacaattgggcctagagtttaggcctattaagggatcgtggtttagagatcttaactgaaggcagaacatggaccttgtcaaactacgaagatcatggtaccaaggtcgttagagatcccaaccgagattctcaggtacattcaacagctagcaaagagatatgtgcattataaatatgagatggttgcagaggaaaaatatacatagacattcttattctctctttccattcacaatatgcacacacctcacgccattggttgagtatagtttcgtgcataatgatcatcttcgagaggtattttattccatataaataccttgagggagaacttgatccaacaacataaaattaccaacaatcttagttggacatttgtgttcttgaacttcagaacactagctaaaatattttttcaaatataactataatcttaataaacttgtttgcttttttttttttcaaagaagacttgtttccttaagtaaatataaatagtataataatattattgttattaatgtgtattacatttttatgataatattatacattgctactttatttaaaggcgtagttgcattgacctaacaaaaggcttaagtacaataatctatatagaaatatgttttttgttacccaaataaatacattattaaataagtttttattccaagtgaaacattaaaaaatagtgagagttagctacatactcgtactcaaattgaagacattgattaagtttatattactcctaaaagattaagtgtatagcttatttattttttatttttaaaaaggattctctacgtaaatgggtcaattcctagcccaagtttattatgcaaaagtggttcaaaaacagatactttacaaacagcataattcgtaacaattgataacgggcctagcccatcctttgacaaccaagttctttgattcaaactattattattatcttcccactaaaaagagaatacaatttttccattgttcaaatacgataaaattgtgacacagttttcttgggggagataaaagagatacgttaataatatattcttttaatattttcattattataaaaatcccatattgttttattaacaaagagcggactaaagttaataagtaataaaactattaaaaatgtgttattaacatttatgatacaaataaaataataaaaaataactaaaatttaattaaaagtttattattattatttatttattttacatttttacaaaaaatctccggtaatgcatgaaatacttatttgtatatagtctaagattttcaaccaatcatccactagtcttcgaatagtcactattaaaaattataataattaatagccgacaaatataccttttttatatatttttaataattttcagatattaaataatttttactataaaatcttgatatatatatatatatatatatatatatatatatatatatatannnnnnnnnnnnnnnnnnnnnnnnnnnnnnnnnnnnnnnnnnnnnnncaacaaatatacatttttttttatatttttaataatttaaaattattaaataaattttactataaaaacttgatttctttttttaaaataaaattatacacaatcttcttataatgataaaattaaaaaataaaatgtcaccaccaaatgagagagcctcgaatgtgacaaggaaaaatcagctcgtttcgtccatggcagttgcaacatcatgacaacaactagacgaaacattttgttggaccgtatagtgcaataatcgaccgttgagaattcacaaccagaaagtctagaagcaaagattgagaggtaacgttttcaggtgccatttaacatggctctgaaacgtaagatggtgtccacgattctttattcacctaaaataatttgtcttgaacgttttttggttagacgttattgtgatttttatgcaatgtattttttttttctgtttggtacactactttgttgtgagagtgtgtgtcacaaatagtgattcatgatcatgaatctagtactgaaatttaacaatacttaagtgaagtgaacaaaaagatttataaattttaactttaaaattttggattaaaatataatattaagtttattttgagatttttcattattcatttgtataaattttttcgatttatctccttgtttgtacaacaaatattaataataatattaattatatatggaagatatattttatatttgtatgtttacctctctcctacgaaaaatttgagaatctcttggtctacttttgattggttaatttctttcgattaactcgtgttgatgtaatgtatattgaaagggttccacttttatttttatttcttgcttgagcttgtaagtgcactttgttgcaatttctggcctcctccaatccttctgtgcttcccaaggtaataacaattttctttggatttatagcacttgagaagaaggctatatttgagatttaagcccatatcgagaatgtctagttaactcatctagaacttcagattttggatgtatacgcaacctagtttcctgcttaaactattgtgaggaggggttttcgtggatcagttcggaccaatttttgttaaatttatgacccaatttaattaaatttgatcgattcggttcgatttttagatttttatttaaactcaacccgttcatgaacagttcgattcagtttgggtcaacggattatccatttaaatttaattttttttagaactactattttatatcatgattcatccaaatatccaatataattaaaacaatatgtaaatagtcatttttgtccctgaatgtgtaaagacatgataaattggttcccgaaagatgaaaattcaaattttagttctcgaaagtgaaaaaagtgcgacaaatctattaatctgttaactttcgtttgttactgttaatgaaagagtctacgtggcacagagggacaaaaaatgtcacaaaaataattgtcaacatgactgcataatagatcgatcaaaatgtcaataaattttcatttgacaaaaacataagtaagtttccattggataaatttgtcagatcccaaatttcatttcatttaagggtaaaatgaaatttaggataaatactcatttttgtccctgaatgtgtacagcgctaacaaatttgttctgagatatggaaattcaaattttagtatatccatttatatgcatcacaaatttgctacaactatttgtttgtcttcttaggtcattgacacattgttggaacataatagtatcatcgaatatttttgtccaatggaaacttattgacattttggtccagtggaaatttactaacatcttggttcaatctatacagcagccatgttgatagtcatttttgtgatatttttgtcccttaaatgaatgaatttgtttcacgtttttcactttcggggactaaaatttgaattttcatctttcgatgacgaatttatcagtgctctacacattcagagatgaaaatgactatttacactaacacaacattatcaaatgtcttaaagtagtaaaacgattcatttaataccattaacataatattctaaaatagactaatacaaattaaaacaaaatattctttaacaaaatttattataatagtctaaataacaaatatttcctacaaactaatttcttgcaataaactatggtaaccagatttgtaacaactagatttgctgaaacaaatgaacaaaatatgattgttaatattataaatatttgcagttctaacacttggagtctaattagtacaatatttaaaaccaaataaaataactctaaattgttttatcggtttagtttgattttgatcggatatatagatctaaacccatgacccaactcatacattaacgattttgatcagttcgattcaattttgacccaaatacataaatgatctaatccaaactgtttggatcagttcagatcaattcggcttcatgggtgacccatacccgtgaacacccctaattgtgagtcacaaataaaggtttttaacaatatcctcatgagacatacgtatagcttgctctcaaaaaaatggttatgcattaattgggtgattaggaatagcataatttccataaactctatttggatgacaaacaatatcactaagagttgataagagtttaatggacaagcactaaagttgttaactccaagctttgctttagtttcaaagaaaacttacaacacttttaatattgacaatatttgcactcttgcataaaaacattgtcttataaatttcaagtatggggagaggaaatataaggtaggttaagatagttaagtgagaatgagaaagatagtaaactcgatcctttttgttaacaaatttaatattttaaaaaattaatatttgtgataaaaaataatgagcatgtagaggaaatcaatttgcaatttcaacttaagcatttcattattgatggtcactaataatcaaatttgaaacatttatcaactatccaagaattatatatgaacatgtttgcaataagaaaaaaaattacaacacatctctcattttttattgttttactgtttaagcacttttatccattcctacaacttaaaaatttgaataaattagaattttatctaactcagttgattgaataaagtgcgttaattattataaactttctagtaactattttttattcctatggatcaaagaaaaaattaaagtttcttgaaactaaacacaaactccttatttttttaatgtttaccacaaccatccttataaggatacatgggataatatttttcaaacaatagaaggtgttaatgtaagaggagtgtgttannnnnnnnnnnnnnnnnnnnnnnnnnnnnnnnnnnnnnnnnnnnnnnnnnnnnnnnnnnnnnnnnnnnnnnnnnnnnnnnnnnnnnnnnnnnnnnnnnnnnnnnnnnnnnnnnnnnnnnnnnnnnnnnnnnnnnnnnnnnnnnnnnnnnnnaaaatcccttccccttagtaacaagctttatgggagatttataaaatttgtgacaaatatatatttaagtcaatttgtgatggattggatgacaaatattttctctatctaaagcatccatcactaaatgcataaatatattttagtgagagacactgtaaggaaactaatcaccctttaactatctcatcatagagttcgtcacaaaannnnnnnnnnnnnnnnnnnnnnnnnnnnnnnnnnnnnnnnnnnnnnnnnnnnnnnnnnnnnnnnnnnnnnnnnnnnnnnnnnnnnnnnnnnnnnnnnnnnnnnnnnnnactctgttataatataaaattattttatgacaaagattatcatgaataaatcccaacatattttgatcacacattttatgatatatttaatttgaaaatatattttggacaaatgcttaagttacaagacaacttttttggtgtatacattgtttagtggataaaagacaacatacaccaaaaaaaatataaaactcactataataccttttttattaataattatcttaatacaataataataataattattgttattattacaaaataatatattatattattattataaaatataaaataatatatattataacagcgtagaacaaaaatatagttttgctcttgtaacattaccaaccataaaaaatcgtcaaatggaaaaaagtaaccatccaaacacaatatgggaagagtggttttcagtaagttaactaagtgagaacgagacggtggagagggaaaatggggaaagagaaaacagatatatgggaatttttatctttttcatacatttgctttgatcatactgcttctagtggaacaaaaatatgaagtaaactcttataaaacaaagttacttttaatttttaaccaggcctgtatatcttaaaataaatggagatccagtggtatataatttggaatggaaggaagatgtgaaattaaaaattgcccagttaaccccatacgtgggattgagacattgaaatcagaaaatcatagccacacacaacacaccctagaagagcacttgttccaatatgatgatattatggggaccatgaaccgagcatttttctaagctaaggtcgttaacgcatgagcaaaatccacctcagaaaaacaaatcctgttaatggcaacaacaatgggtgtctctttctcacataataatcactttcagaatttcatgaaggcactgaggtggatgcattgcattgtacgacaaggatgcaatgccgacgcaatacgccgcatgttattccaaaattggatgatagaaaaggcatcacccttcagctttatagattttgtttgtcttcttttgttgcaatcttaccggccatttggaggccaccttgtttcctgttttgttctctctttttttcttctagcaattcaccatatattttgttcctatccttctccttctatgctaatttgacccactttcaactaagaagttgttggcccaaataattttgtatttaattctcttaaataagaaagttagaatcttaaagatgaaaaaaaaaatgtaattgagaaaatagattatagtaaaaatgatcaatcaaatttatcagtaaatagtaatcatcataaaattagtgaatatttcacattaatatcatgtgataaaaaattaaccctttttaactaataaaataaacaatccatttaatgattaaaaataaaatcaacaaatcattctccttgaaagatacaagattggtctaataatgaaggaagaaagaaaaaaagaaaagatcgcaatttcgatttcttccattaacaaaactaataatactaacaattaacaagtaacattttctataaaaaataaccctccttgtttatcaaaataaatgtacatacatgattttgaccataggctgctatccacttaccccactagtttgatttgaggtgggaaagtgaggtttttcttgtgaacatttaataagaagccactttggatttagatagaaattgagcatggtggtcactggtcagagtagtagctagctaattcagtcaccttatcactggtgaaagcgatggcttatagctgctgggaaagaaaaataaaataaaattgagggcgcagaatcttctacaccttaaattcaaaaggcaattgactatgcatcttttttttactaaataaatataacccacgtattcaccaacaaaagaaattaaagtgttgaatctttgttaatttctgaagccagtcacaagcaaccatctgctatatgctacccaaaagttcaattcctcatacgaataggagacgtgttaaatccacattcctttatttctttgttggtttccatccgcatcaggttcacatcctgatggggatatggaattacttcaaaaattccattcaggtttgaacttcgtacatgtgtttggagacattggataagcattggttaatggttatattgctcacattgtggataaggcatatatttagtcaaaagaagtacaaatatgctacttgttgttataagctaataggaaaataacaagggatgctacagagtcacaaaacattgtgcaagttgcagcagaacacgtttgatacattttgaggtgaataagaaatgggaattgattatgtttgatacttatcaaattcaaaaggattgcaacagtatggaacattcagcgctaatttcaatcctgtgtgctggttgagctaataatggtactacatttcaatccaatgaggtaagtttgtgccgagtgatgagagacttaagcagcatcaactcgcacgtgtgcatcaattgatacagattattttaatttaactagtggtattcaagttctgaatatgtaaattcattataaatacttgaaagaaaacttttatgatctataataatcatatttaacttgaacaaaataatcttcaattcaatctatagacccatgttgtttcaaattaatcaataatatttaaattataaatatgtaattacattataaatattaaagaagaattctataatgtataaatattatatttaacttgaataaaatgatctttgagaaaaatacatgtattttatactaaaataaaaggaacatagtggtgtggtaggtcacacttggtgtaagtaaaagtggcatcccaacaaggaatcaatcattttttgtgttctgaattccaaaggagaggaatggggcagacccgtactgcgttggcacttatcttatgcaatctttttgcatatctagctaacaagaagattcatttttgcctctttggatgcgggtcatggcctagctatattgcaacctgtaggttccaaaattaacgtggctcgccgtaaacttggccatgattgcaagcgtggaagctatgaagaataatgctgtagttgggataatatcttaaagactcttttaagatttacctagatcttttttgaaagtatatatgataattgattaggttcccgtttatttgtctacccttttctcaaggttggattatatgcgtcattggattttttttgtttcaatattttcctttttttccctagaggacaataattgagatatgcaaaaagtagacaaagaatggatcattatcagttgagtaacattccaacccacataaaggaatggtacctaataactgcactaactagaggttgccatttcgtcacaaaatattcgttacaccacttccattttcctccctcgtacaaagcatcttttaattagaaactacttatctaatctttcttttgtactaattaatgattaatgttgatgattataagaataagaattcagttagaatttttattatctatagaaattaaagacaatataaaaaaatttataacactcacacatcttattcaacaaactgaactagatttttttagtaagaatttagttagaatgagaactcttaataatataattattttccaacacattcttttgaatgtactagtattatttattattggttgaatttttttgaaaatatataaacaaattttataggtcttactttttttataagcaagtgtatccttcattgatgcaaatgcaatcatacttgagttgagtaaaatcactataggtaataaaattctcattttaagtgtttactttagctacatttataagattcaaactcaaaaacactaattaaattagaacatttccacttagtcaatccacatgcttgttagtaatctcacttcttatttaatgattttttatatctaaactttaactaatagtaaattgtgagttaaaaggagtatttttcactcactccattactctcttctctattttcattcatcttgtttttgacttttttttaattctatcaaaaacattgttggaagaaaaaaaaaagaaaaaagaaagacatgtgtgtatatacaatattggaggcaaagtattttgatatttatttataattattaaaattagaaagaatatatatttactccttatactttcagtataattagtgtccttgtattttcatattaataaatttagtctttaaattttttaaaatatacaaatttaatcctcttgaattttaaaaacatgatgaattcttaaaattaaagtttgaagaaacaattcatcgatcaaaaagtataattttttatcacatttgagaaaaatataaaaactaaacatttttttttaaatcgaattaaagatcacatgagaaagaaagggatgagttgatggctgttataaggctgctctttacctctgagtctctgacaagttaagagacgaccaaaaacttaataggaagtagcatctggacaaattgatgtgtgatagaatgatatataggaatcaaccaatgaagcacaattggattttcaaaagttaatgctgtcacagtgttctgtacttctgcttatgctaatccaatatgtccttacatgacatgacgacaacatgccatcacaataattttagttgattcttaaataggaaaaaacacattgtcatgtcatcagctacctatgtaggtttttacaataggaaaggtggtggtggagtatgctttcattagcatgaagaagtgcaagaattataagtgattgacaacattcatgcatggaatattaatattttccaacatcaaatatttggatatattttgcggccaactcaggagattgcttaatttctttaaaacgcacataacaacttggaagaaaaagagatggagaaagaggagaaaagaatgatatgtctgtacgtttgtgtgcattttagatgtagcatgattggcctcaatggtgcttgttaggctgcacatgatatgcaatagttctatgtttggcatatactatttttatatagagaaaaatgttttcatttttattcctcaaatattattctcttcattgtaattattttattttattaatttttttaattattataattagatttttgactctatgataaaacctccgatatgtccataagtttaagtcttttaggctagttataagactaatttttggtctaagatttatttatacttaaagttaatggccattttccaaaaatatattttgtaggaatcaaaagttatcctcatgaactcagtctttgttgtcaattaaactacataagttgagttccttgttttattggtttgtttacttattttttattctttttgttactatatataagaccaaactatctaattcattaaaattaaaaaataattaatttagttaatattaataaatctatcttaaatttataacatttttcaaaattattattgtcattaatatttgtttctcttttaattgtttgttaatgcattttttctcttcttttagtgaagagtatttttagtctaaaaaaattaatgcaagcaatattataaatttaatcttattaaaagaataattattattttaaatttggatcttataaataaaaataaagagaataaattgatatataattgtaaagaatagatgcatcgtaggcataaaataacactaatttatgacagcacttgtgctgcttgatatggtattactattacatgtacgtgagataaagaaacacaatctgtagcgaggattggctccacgaaaaatgaaggttaaagtnnnnnnnnnnatttttggtctaagatttatttatacttaaagttaatggccattttccaaaaatatattttgtaggaatcaaaagttatcctcatgaactcagtctttgttgtcaattaaactacataagttgagttccttgttttattggtttgtttacttattttttattctttttgttactatatataagaccaaactatctaattcattaaaattaaaaaataattaatttagttaatattaataaatctatcttaaatttataacatttttcaaaattattattgtcattaatatttgtttctcttttaattgtttgttaatgcattttttctcttcttttagtgaagagtatttttagtctaaaaaaattaatgcaagcaatattataaatttaatcttattaaaagaataattattattttaaatttggatcttataaataaaaataaagagaataaattgatatataattgtaaagaatagatgcatcgtaggcataaaataacactaatttatgacagcacttgtgctgcttgatatggtattactattacatgtacgtgagataaagaaacacaatctgtagcgaggattggctccacgaaaaatgaaggttaaagttaaaaaaaaaaattgaaaaaattatatatcgagtcttttgttaatatatatgacatttttttctaataaatgtgtnnnnnnnnnncgtgagataaagaaacacaatctgtagcgaggattggctccacgaaaaatgaaggttaaagtaaaaaaaaattaaaaaatttaaatgaaaaaattatatatcgagtcttttgttaatatatatgacatttttttctaataaatgtgtcttttttgttttatcaaaattaaaataaaatatatttttgttgataaacttaaatttgtgttttaattactttattattggattggccctcaacaaactagacataaagagaagaaaagaacaaatattttcaaataaaaaatgtttgagaaaaactaaagttataaatgaactatacataactaattcaggttaaatgaattatgggagaaatgcataaattcagatgattaagttaatttttaacttatcttaaaaaaaatatttttaacttttgtaataaattagaggggtgacgttcggacgtgttaagtatatctctttctgactcaaaattttgttaagatgaattttgtgaactgctcaatcaagactttatgatatttgggacaaaatcgggtcaatttaatttgttgtcataatatattaatcttgacatattatatagttaaaatatagaattgaaaaagatacaactagattatgatatatttaatttgtaatatatattttaagataaacaatatcaatatatataagtatagtattatttaaaaaaatattatttattaagtcaaattaaaagttatattattaatatataattatttaaaataatatttttaaaataatatataacattatgatgggttggacaccccaaaatataactcgaaccgagtcgagataatgggacgggccgagttatgaacacccataataaattagattcattctgtctcttcttaatttattttaatttattttctgataagtacttatttagaattatttctacgttgatttttttatgctgttcctacgttggttttaaaagaaaaagaaaatgcacagtaataatccaccaagaagttctccgcttcttactaagagacacttcacacctttgtatatttaataagaggaagagacagaaatagtgggtaatttagatagcagttaggagtatgtttggatacagatacaagatacaaatttacaagtgtttttgaaatttttttattgaaaaaaatatatatttttaacataaaattctcaaaaatatttatgacttatatctaaatagattccatcgttctgtaaaaaaatataattgagataaaaaaaattgaattaaaatagaatataaaaatgtgagacttgtatttaaatttaaaacttttttttcatttctcttcttgttttttttttcatcaaaacgtgttcttaatgaataaagaatnnnnnnnnnnattttctttattatagttatacattgtagatttattattatttgatttacatatttgtatattatattccacgtttgaccaatctatattcaaccatgaataaaaaaaggataaaaaaattaatctaaattcaaccaagtcaaacaaaattttctctataaatttttaatcaaattacattacagagaattcaaatttaaaatccttgattaagtcactaaaacgccaataaaaaaatttaaaaagtaattattttcagatttgtataacctaaaattagcatttttaattaaatcgtttgcatttatttataaagagttattccgtcaaactatcattacaaaaaattaattgtcttaattagtaaattatgatttttgatttgtgagaatactaacctgaaaatatgaaaatactcaatgcaaacatggaaaggtgtgacgatattagatttgaggattcactaggtccttgttgacttttttttggtgatgatatataattagacaaaaaaaatcaattaaaaaacaaatacaagtttaatgatctattgaataaaaaaggttaaaaaagctaataaaaattatcaaatagtttggagacttacggaataatttaaccagtattttaagtacttttagtattattgtcgaattaaatttgtgaacctgtactgtatatttttatcgtgcaaattattcaagtgaaatttaattttaattgtaaaataacacaaaaaaaaaagacatatgaggcattgcacctaaattttaccctatacaaactttcacgttatattcttaatctcaatccttagaacgttacaaaaaaatgttaatccttaaaaatataattttaaaaatcagttcattggactagaaaccaatggtataatcagtcccgaactcccgattaattttgtggttcgacccttaaattggtactgatgaaccaatgaaccaatctagatgaattggtgtttattatactattaaaatgtaatttttaatgaaaatacgacaaaaaatgtcacacccaacaatcaaatccaatacttaaaaattatttaccagatcaacttatcatttgatcaccatgattaattattaaatatttaacacaaataatacatatatttatattttgttacgtataccgatttatgtgatttaattattaattcattgatttgattaatgatcatcaatccagtgtcataatcgagttatttaacaatattggtgtttctaatattatattaaattgattaacattttacacctcatgatatacangtttttttctaattttcagtcactaaacacattttaaacattaggataaacactttttgaagaactaaaaaaatatggatattatgagaaatgaaaatttaattaagcctcttatatttaacattcattttaggactaaccaattattaatgcaattgtcaaataactcaaataaattttaggcaaaaataatattttgtttctttaactttattttcgttttggtttaattttaaaatttctttatttattacctcttttattaattttaatttgacccttttnnnnnnnnnnattttctttattatagttatacattgtagatttattattatttgatttacatatttgtatattatattccacgtttgaccaatctatattcaaccatgaataaaaaaaggataaaaaaattaatctaaattcaaccaagtcaaacaaaattttctctataaatttttaatcaaattacattacagagaattcaaatttaaaatccttgattaagtcactaaaacgccaataaaaaaatttaaaaagtaattattttcagatttgtataacctaaaattagcatttttaattaaatcgtttgcatttatttataaagagttattccgtcaaactatcattacaaaaaattaattgtcttaattagtaaattatgatttttgatttgtgagaatactaacctgaaaatatgaaaatactcaatgcaaacatggaaaggtgtgacgatattagatttgaggattcactaggtccttgttgacttttttttggtgatgatatataattagacaaaaaaaatcaattaaaaaacaaatacaagtttaatgatctattgaataaaaaaggttaaaaannnnnnnnnnnnnnnnnnnnnnnnnnnnnnnnnnnnnnnnnnnnnnnnnnnnnnnnnnnnnnnnnnnnnnnnactaatactaatatatcttttaaattaccctatacttttataaaattaaatatttataatttatagtttaaaatttataatgaaaaattcaccaaaaataaatataataaaattatttaaatttgagaaatagacatgtaaggtacaataataaattcaacattttaagaattagaaatttactctaaagaattaaataaaaagttataacaaataaataaaaaatcaatagctaacactaaacaattatataatatatataatatatgtatatatagttaattattattttaatcatttaccaaacacataatcaattatcaccaatcacacagatcaattgatataagattgcttcaatgtaaatagaattttcggttaaatatctatgtatgtagctaagttaaattttaccaaaaaaaaaaaatcatgaatttcaatctttttaatttttataattaataattataacttttcataagtcagtctaattcagtagggtacctaaccctaaaacgaggaggacaccgatccacagagcaaagagagaaaatggggtatggtagtatgtcccacacacccacagcaaacgagttgcttctcgtgtcatctccgaactctctgggacctggaccaccttgatctcgacacgtgcctaccattttctgattgcgacgtgtcggtccatcaacgcctcatcttctccattcgcgaaccttccacgttggcaatatttgggtccttctttttcatctacaacggctcgcaatctctgagctggaataacaccgtcgtatcgtatccctgggtcccactgccacataaatcattcgccggcaaaactagatttgcctttcaaaaccgttgccattgaaaggacaatattatattattaaataattctagctttttccattttccttactttgcaatgccgttacgattttatttttgtcaaaaattagtcacctgcattggattttttagataatcaaaattaggtattcctcttttatcagagaatccctcccatgcatgctagtgaatagtgaataggtattcctcttctaaaatttgtaaacctcttaaggagcgtgtgcatgttgtataaaagttacaaaggacgacaagcatcatttaaatgtaaatcactatctaggcaaaaatttaaaaataatataaattaattatttaattgggaaaagggggtagtttgaagaatatttggcaaaatggggcagggcttcacgcccatttggggtgtgtttaaacacgcccaaatggggcgtgtttgtcctggtggcgccacgtggcagggaaaaatgggggtgcagggttttcgcgatttttcgtaaaattatggaagggcataacttttgactgagacgtccgattgacgcgaaatcggtggccacgcgctcgaaatcgagaggagaaggcctgggcaagttccgaaagggacttggccaaaattttttcccaaacaaggcctctaagtgcttcaaaaatgcgattttgtctttcagcctccaaataattgctcgttttttgatttttttacttaatcgattagtgaattgcatgctattttttgttttttcaattaattcattcaatttcgagcgttttgacataaaatacgcctccatcggacattcctataaaaaattttgactgtctaaagaatttgcttgacgtatatatatgggtgcaaacaggtcaggtcagacttcgttaggcctggcttggcctgttttttattttttcaattacttcttcaatttcgagcgttttgacataaaatacgccttcatcgaacatttggctgacctatttaaggctaggttaaagctttctgaaaaacctatttaaataaaaaggtcaggctcaaacctttaaaaaaaacttgttaaacctatcaggctgacttatttaatatatatatatatatatttattgtaaagtaggtttttaatatataataggctcgtaggtcaaaccaagcttttaaatagcctaggtcagacctaaaaaaaacctatgatggataaatagagtaggccaagctttacatttttaaatcaggcccaagccaggcctagcaaagtcttacctgatctgacctgtttgcacccatatatatacgtcaagcaaattctttagacagtcaaaattttttataggaatgtccgatggaggcgtattttatgtcaaaatgctcaaaattgaatgaattaattgaaaaaacaaaaaatagcatgcaattcactaatcgattaagtaaaaaaatcaaaaaacgagcaattatttggaggctgaaagacaaaattgcatttttgaggcacttagaggcctcgtttgggaaaaaattttggccaagtccccttcggaacttgcccaggccttctcctcttgatttcgagcgcgtggccaccgatttcgcgtcaatcggacgtcccagtcaaaagttatgcccttccgtaattttacgaaaaatcgcgaaaaccctgcacccccatattttcctgccacgtggcgccaccagggcaaacacgtctcatttgggcgtgtttaaacacgccccaaatgggcgtgaagccctgccccattttgccaaatattcttcaaactacccccttttcccaattaaataattaatttatattatttttaaatttttgcctcactatctatcatcgaaaattttatatgtgaattatctttctattgagaaattgggaaaatgtagtactctttgcactccatgtaagtatgtagtcactctcagatatattttttgttcttttaaagtaattttcttctcactctcttaattaatttaatgactttttttactttataatttttttcttttttttatatcacatgcatttttatgagaaaaaattttgttcaaattaataagaaatattagctaaggatatataaaattgatctaataataaaagaagaatgaaaaaaaagaaaaaattacgagttcaaatttttccgttaacaaaaatggacaatactagtaataagtatttgttgataaaaagaaaaagaaacattagttgaaattaccttgtccgagttataacaagttcttatatcttaaataatgtttcaaatttgtgtttgtagataaaagaaaaatgtaattgaagaaaaaaaatctaaatgttcaaccaaaatttttctgaacaaattagctagttatctataagactataacgtacagaatagaaagaaaagacatccattgtaagattatctatctgggagaaatttgttcatgctatttaaacctgaaacttagtttactttataaaaaatataagcataaaacttagctatatcattgaagataaaccattaaaacttttctgatgaagattcggatgacatggttgttgatgttacctagaacaacagtttccacaaatatatatacctactcacatggactatgtcatcttactaaaatatatatataatttttttatttggaggggcagggggaatggatggattgccacaaacaactttatgactacttactttgattatcatgtatataagcattcgtcatttagttgtccttttctagaagtaaattaaacgtacgttgcagtttggtagcatatatgccaccttaacttgtgattcaaatgaaaaggtacacaagaatggttgaagaaaattgtgaaccacaatgaatcctgaaacacaaggaatacaagctaatgctagcaagtgagaaagctctagatttttttgtttcacttttccttgaaaaccatatctaaccgatgaatctattacgggcttaatcattgcccatcatatatttgaacggggttcttgataatttatttatttattttatctaagaaggagcagaaaaagttgattatttattgttatcatctagacttagataactctagctgttctcattggtcgtttagttgaagcaatataataaacaagccaaatccattttcaatttctccttggtcttcaaaggagcagaatgataccacttgaaaaaaataagaatttataaatatgaattgtgtatcacagtaatacaagatgtctctatttaaagagatcaactaaagataaagataactaaagataatagctagagataataactatcaactaaagataactaaagataataactaaagataatagctaaagataaaatctaaaatatatctatctaaaatatatctatttacaacacttcccctcaagctgaggaatagatattaatcattcccagcttgccagtaagctcttgaaaactttcagaggaaagtcccttggtcagaatatctgccttttgaagtccagaaggaatatatggagtcgtgatcaaaccgctatctagcttctctttgatgaagtgtcgatcgacctcaatgtgcttggtccggtcatgttgaacaggattatgagctatacaaatggcagatttattatcacaaaataatttcatagatccttcatatcttattttaagatcatcaagtataatcttcaaccaaagtaattcacaaacaccctgagccatagctcgaaattcagcctctgcacttgatctggcaactacatcttgcttcttattcctccatgtcactagattaccacaaagaaacatacaataaccagtggtagatcgacgatcagttacagagccagcataatctgcatcagtatagacttcgagggagagattaccatcacgtctgaataacagtcctttaccaggagtggctttaagatactgaagaattctccaaactgtctgcatgtgtttttctttcggattatgcatgaattggctcacaatactaacgacataggctaagtctggtctagtatgagccaaataaatcagcctcccaactaacctttgatattgtcctttatcaaccggagaactctcctcctcataacctaacttgtgattctgttcgatggaagtactggagggtttacacccaagtttccctgcttctttgagaaaatcaagaacatatttcctctggctaacaaaaattccttcctttgaatgagctacctcaatccctaggaaatattccagtcttccaagatcttttatttcaaatttagaggccagtcgtgcttgtagaaggttcttttcagcaatatcatcacctgaaataataatatcatcaacatacacaaggagtacagttaacttcccatcttgggaatgtttgaaaaacagtgtatgatctccttgactctgtctgtatcctaaggctatcataaccttagtaaatcttccaaaccaggtggaatttccatatagacttcttcttctaactcaccattaagaaaagcattcttcacatcaaactgattgatatcccagttgtaatgggcagcaagagataagagggctctcacagtattcatttttgcaacaggagcaaaagtctcatcatagtcaataccataggtttgagtgtagcctttggcaactaaccgagccatatatctttcaagagtaccatcagaattgtatttcaaagtataaacccatctgcatcttactgctttctttccatttggtctatcaacaactgcccatgtgttatttttctccaaggcattcatctcttcttgcatggcttgagtccacttctcatcttttaatgcttcatctactgattttggaattgagattgaatctagtgctgaaataaagcctttgtgctgcatagaaagtttagctgaagagacaaactgcgagataggatatttagtacaaactgaacaagaagaacaagaatttttggtacaggacctcttcccttttcttagggcaatgggcaagttatcagaaacactaggtaagtcatcagaagcaacatgcaagtctttggacaactcatcatatacactaatattaggttcagaaataggagattcaggacttaccgtttgttcagatgattgaggttgctgaggaggcaatggtggctgcttgttcctgtgatatactaactcaggtgtatcaattcttcgtatttccggaccattagtcgatgggacagacatagaaggattcgaaacaatgagaaaaaatacaaaagtagacatgaaaggttcagactcaaagaaagaagatgactcagaacttaccgaactgctcttcccctgaagatgaggactagggaaaaaagactcagattcatgaaatgtgacatccatagatacaaaggttttccgacgtgcaggatgataacacttgtagcctttcttgtcaggagcatatccaagaaaaatacatttgagagctctaggatccaacttactgcaatgatgtttgtgaatatggacaaaggcaacacatccaaacactcggggttgaagactttgtaaggaggacactgatggaaagaaggaagtcatagagtgaataggacttatattgtcaaggacccgggagggtaatcgattgattaagaaagctgcagtaaggatgacatctccccaaaaatgatttggtacatttgtttgaaaaaggagagcacgagcaacttcaagaagatgacgattctttctctcagcaactccattttgctgaggagtgtcaacacacgtgagttcatgaatcataccttgatcttggagaaactgagaaagacgctgattgacatattcagtgtcattgtcagaccttatccttttaattcttttcccaaattgagtttcaatcattttataaaatttgaagaataattgaggtacctcggatttttcatgcattaagtaaatccaagtgactcgagtgcaatcatcaataaaagaaacaaaccatttattaccagaaccatgagtaactttagaagaaccccaaacatcagaatgaataagatcaaaaggttcaacactcttaatagtactagaaggaaaagatgcacgatggtgttttgcaaattcgcaaatatcacaacgaaaagactcaacagacttggacaaaaataatgacgaaaataaagacttaagtagactaaatggaggatgccccaagcgcttgtgatgtaaccaaaccaatgagtccgtagtacactggccatgagttagtaatatgtgatccttagtacctttgtcaaaagactttagaaccaaatagtacagcccaccttgctccttagctttcccaatcatcctccctgtggtgagatcctgaaagacacaatgagtaggaaagaaggttacagtgcagtttaaatcttttgtaatttttttaatagaaaggagattggtggagagtttaggaacatgaagaacatctttgaggtgaaagaaaggttgtaaatgaatgttaccagatcccgcaactgatgtatgtgaaccatcagctacgactattgtatgagtatcaatagtagggttataagaaagaaaagattcagcacaacaatccatatgatcagtagcaccagaatcaattacccaagaatgtttaaaatcagtacaagaagtaagaaaagaataattagtggaactcataccagtcatggtcaaagcactagaactagattgcttactcagtgaatcaatgatggtccgcagccgctgtaactcatctcggctaatagaaggaaattctgaagatccagattggacctcatttggtgcagtagttatgtcaggagaaactacatgagtttgaccacgcatccttgccatcttttcatagactttctgctttccatggagatggtaacatagatccttaatatgacccagccttctacaataagaacaccaacaatcatctttcttaaacttggaagatgcaccatcaacaatgttgttgaaggaattcccttaagaaaaaccattgtcggaactagccataccaaacacaaaccaaaaaacacaagagaaaacagcccacagtaatcctctcggtccaaaaggttccctggaaaaactttcggtgacagctaatggcagcaagagtcaagaataagagtttcgcacttaaggcgataggcgcggaagcaaagccctcaaaatcgagagctctgataccaacttgaaaaaataagaatttataaatatgaattgtgtatcacagtaatacaaggggtctctatttaaagagatcaactaaagataaaaataactaaagataatagctagagataataactatcaactaaagataacaattaaagataataactaaagataatagctaaagataaaatctaaaatatatctatctaaaatatatctatttacaacaatacctgaaggatatctatatattatcatgatggtgttcacgtgtgggtaaaaaaaaatcccccttttgtcgatcatacatgtttatattaacatgttactcgtaaaaatatttatcaatttagtaaataatcaatttttgtcaaaaatttaattaatcacctttaataatcttttactctcattttcattttcttttatccacaagatttaaattaaaatattccttaaaatgatcaaatctaatattacttaaactaataacttattactattcaatcatacatgttgagtggactgatcccaatatcacctatatctcaatttatgctctttaatcattataaatataagatctaattttgtagaattttttcatgacattcagtataattatatgattaagatttaaaatcatataataacataaaagaggcgactgtaattttttttaaaagaatcatgtattttaatattgataattcctgataaagtttaataattaatatatatttttccattctcacactaaatatcttttgaaagtgatatacatacgtcattcatatatttttgctcacatacatctacataattttttttaagtgataatatgattttaaattttaatctttgtacatagttacatactccacgaaaaaattatgactcttttaaatgatcatgtgattttaaatcttaattattcatatgcaattatatagctcagatttatcattctcatttgcatataagaagatttgcatgtgaatgtagtaggaacactttaggatcatgccaacatatgatttaatacttacgtttatttgaggataaaaaataactatatagttcatggaaaactctttaaaaaaatcgtgtaatgtactttaattttgttactttgaaaattataaaaaaaagttttataagattttaggtgcgtattttattataatatttgccaccatacttaaaaaattatttacaaaatcacatgtcactctccaattattctaggaacacactagaatagttacaaatatggagggggaattttgtgttatttttttaaccattgcgtgagaatcaaaataaagttttattaaataaagatttcactttttattattaaaagttgaaattgtatatcaacttacaatttcaacaatttttttagttatttttgaaatcgtgtattagaacattattttttgtttttttaataaaaattgtgtcaagtaggtaacacttgttttttatttttcaataaagttttgccgggctaatataaaatactaagattttttcataaaattaagaaaaacatatacatattacatatattaaaaaaattatttgtgggatggtgtcccacatgtaggtcgtcgcgtgtgccgtcgtggacttcccttcttcttgttattgttaagttggtttcgcttgtcattgtcttggtctatgatcacattgagttggttgggctcagtatcatatcgtcattaccggcccaagactgtcactgtcattgttgttattatcttcatctccattgccttcatcaccactattgttccccatctgaggaggtaatgtgggatgataacaatctattaatggattgtatgcagacggtggtgtagtggaataagtgaccaacatatttgaatgttcatgaaaaatattagaagtataaggaacttgatgaaacacaaattgaaatatatatgttgaaaatcccattggcttaaatgcttgttgatatgaattgggcctattcctaagatgtcaacttgttgataagtagattgcccaacaaattgattttggggcatataacctaagatggttggttgttaataagaagattgaccaacatcatattgatggtagggcatatatctggaagagccaatgggttgataattgggttctgcttgtggctcatcatgctacaaatgtttttgaataattagatacaatatttaagtagtaaaatataaagttatattatatcaaattgtatacttacttcctcactaggtggtaacttgtgaggtgatatgtagcgtatagttttcagtatataccatttcatgtattgtgaattttcacgcaaatgtccttgtccttgatacttttgaccttgaactataagactgtgatgatcattccacataacaatccattcttggtggtattggggccaatatctatcgattcttcctcttatgtcttctttgtggagttcatcagtatttaatgggtcaagtggaatatgttgacgaaagccaaattgtctcatcgactggtctgcttgatgcaattccacggtaacgaaacatatgagaagtatgaaagcacgagttacgggataaaccttaacatttattaaatggcttagttcaactttgctataaggagtccataaaaaccgtaattaaaattatattagcatatcataatggttttgaaaaaatattacaataaaggtgttattaatcaaataacctcctttggacgtaattggtcaaacatgtagcgtataatatgcactgcataggtaggagtgatttttttttcatgggatgagaccacctatcatgtaaaacaattcatttgttatacttttgagaagaaaaaaatgaaaataattaatagaatcatctagttgaggtacaaggcctaattaggccaacgagcgatgatctatactgttaaactaaatgaatagtggtgtgactgtgggaaatttcaggcaatgcgactaccttgctatgatgttattgtagtttgctcctcttgccacctacaaattgacttgtatgttgaccccgtgtataagttgcacaacatttacaaggtttatgaacttcaattccactcccttggaaataaggattactggtctcaacattcgggtccaaattttgttcttgatgctaacaagcgacgatttatattatacaggctaagtactactcgcataagttcggtgtgtcgaaatgaaggtcatcatcatggtaattgttcatataggcaatgaactatgtcgaatattttataatttttaatctttcaagcataattaattattatatattgtttaatttataaatttcatccatataccactttatttttaatatattatttttcttttttaatttttcttaaaaatcataaattttaacataaaaataaaactaatttaaaaaaacataactgaaatcgtgcacataatacgatttcaattttttaaaagatttttttttgaaaatcatgtcctaccatacgatttcaataggaaaaataaaaatgaaaaataaaaacagaaatcgtattttaacatacaattccaatttttacaaaaaaatattttaaataaatgaacagtaaaatcgtactttgatatgccattttttcattgtgaaatcgtatatcaaaatacgatttatccattttcataatttttttaaaaaatactcattataataattttgaaaatatatatccattatgataatttaaaaaatatccatttccgtaattaaaccgaaatatgtcttgataagagttcataatgtaagtatacatactttcatcattgatgatcatgtatactcaggctactagctagaccataagagctggttttagattcagaaaattcacctattttagttcagtctcctgggatatttctcgattataagtaaatgtgttaatagtatattttatcattcagctatgttcattttangatttttagtattcaattttttttttacattttaccattatttttaatgttttgcacatttttattttgtgtatattttatttatcatatatattttttttaattttcacgtcttttgtcattagggtgataccaacataacatctttttgcaacagttgataacaacaatactcagcacttcgttacaaatttaacgaatctataaaatatgaaaaaaattaaaaaatacggcaattaaaatataaaaagaaaaatttgagcgataaaatttatgaaataataataataataataataataataataataataataataatatgataaaatgtgaaattaagcatattttaaaacaatctttaatttatttttttagagaaaaacaatcttttacatatgacttgctaatttattccaactaaataattagatttttgaggaattcgctagtgtacaacccaaactgaaattgtaatatgaaaactataatcgaatgtataatatgcaaactattgcagattttcataaaaactatttgatgttttattaaacaaattcaatctattgtataatgtttttttaagtataacaaaatatcgatgtaaaatcatattttttttcatacaagggggaaaataaaagcaggaaacaaaaagactaatctaagctagctaagtcagtaagataaagatctatataataataataataatagtaataataataataataataataataataataataataataatgagaatattttttttattgtatatattacaatgtttcatgcatgtttttgatatatatatatatatatatattactgtaggtctccttttctttaatgtaatcctgtttcatatacggtagcatgatacatataagtatctcatccttccgtagaaatttgaacattaattcagtatgttgttagagattaattgttttaattactaggttcaatcccattcccattagttgggtgtaatgtttggtataataatgaccgaatatattgcaatattatataacctttttaacttaataaatgattggcccctgcatataggtcccgcacagcaactaaagtgaggctccttcgtaaagatagaccaaccctgttattgtaaaataaaaagtaaaaaaccaagcagtgtccaaatccaaatgtcaaaatccattttaaaagttctgaaatttttctttaattgttatgaagaaaagtgagcctgaaagtactgtctcatctttttttaagtatacaggaccacagaatgtgaaatatcgtcaaactcatacacacaatcatttattatagcatatttctagaataaagacatatcagcaatatatttttattattataagtaaatttcatacattaaacaaaaagatttgatataaatatttttaaggttaaatttgtctacatgtttcccaactatttaataatttttaaataaatttctaaaatcaaaatcaattaaatctctgaaattatatttatttttaattggatcctaataaaaacctaattaaaaatataagttcgaatacctaattgaaaaaagaatattatttttatcctaaagacgggagaatactgacctataaatatgaaaatactagtttgtatagacttaacaatttttcattaaatttttnnnnnnnnnnnnnnnnnnnnnnnnnnnnnnnnnnnnnnnnnnnnnnnnnnnnnnnnnnnnnnnnnnnnnnnnnnnnnnnnnnnnnnnnnnnnnnnnnnnnnnnnnnnnnnnnnnnnnnnnnnnnnnnnnnnnnnnnnnnnnnnnnnnnnnnnnnnnnnnnnnnnnnnnnnnnnnnnnnnnnnnnnnnnnnnnnnnnnnnnnnnnnnnnnnnnnnnnnnnnnnnnnnnnnnnnnnnnnnnnnnnnnnnnnnnnnnnnnnnnnnnnnnnnnnnnnnnnnnnnnnnnnnnnnnnnnnnnnnnnnnnnnnnnnnnnnnnnnnnnnnnnnnnnnnnnnnnnnnnnnnnnnnnnnnnnnnnnnnnnnnnnnnnnnnnnnnnnnnnnnnnnnnnnnnnnnnnnnnnnnnnnnnnnnnnnnnnnnnnnnnnnnnnnnnnnnnnnnnnnnnnnnnnnnnnnnnnnnnnnnnnnnnnnnnnnnnnnnnnnnnnnnnnnnnnnnnnnnnnnnnnnnnnnnnnnnnnnnnnnnnnnnnnnnnnnnnntatgtcattatatatattaattaggtcccgaattaagagacttaattaaaaattaccaaatagttgaagaacatacaaattaatttaacctgtttttaataaaatttacatgaaactcatccgataataaaaacactactataactattgataaaactacacaacattgaaaattatcactatctcacacatacaaagatgcctatattttttaaatgaacgtataactttacacgtataaaaatcatattatgagtatttcaattaaaaaaatcgtatttaagaatttttcttattttataaattagctaaacataaacacacactccgttccaaaaagaagactataaagaatcctatatttttattttattttattttgtgtttttttaactgattttttatttttgtgttcttaagtgtaaaattagttaaattacattttataatgtttgagaattcgtttgggccaaagttttcaggttgcaaatttgatggttcggcctagctctatatgtcgagcaataggtcaatttaatcgtaattaaaaaataaaattaaacataattaatatacaaaacctaagaattatttaaaaatttataaaaataaaaaactaaaacagttaagtaagtcgaatcaaatagcctcatttttttaagctaaattttaagagctcaacttgacctattagactaagctaaacagacccaatttttttggcctaaattttaggaacccaacttaatcgatcttatttatagattattgaaatccgcccattaaaactgacttaaattgtcaactctaatcttcaagtgtcttcgatgttaagtagagagctagctcacctacaacaatttggttaatctaataaataaaagacaaagtctaaaggtgtgggtgtgaatgagaaatattacattatcatgtttgacacatggtatttatatattacctttaattacgataaaaaaataattacctttgactcattattttccatgaatatagttaaatcttgatatcgaactgtttttcttttgacagcgatatctaactgttggaacttggaagaaatattcactaagtaagttacgacatttaattgcatagctattatttgtcatgtgcaaggtaatataagcatattacactggttcgatattgagtttgcctgctttttcaatcttataggctattttggggtcaaaccttcttggtctagagagaacaagtttaaatttatacataggtcagttaatttaaactttaaataaatcaatcaatcaatcacaaaacattataataaaattttatctcaacaataatatcaatatattgttattattcaaataaattagcctatttaaactctaaaagtgttatttaaagttcaattcttttacataaataaaaaattaaacttattattaatttgaatatttgatctaatgagtctttttaagggatattgatcttgattgaaagtcaataaataatcttttgaaatattgagattttttaaaaagattaatttctgtcaatatatattttttatacgatcagaaatctaactcatagtcacatgattaaacaaaactaaatattatttagttatatatatatcaattatgtcataacaatgataagttttttttttctttttttctgtattgtgtggtttttctaacgtgataaatgattttttttttcattgccttttattccctccgcagtattccacacagtagtagtgctcgacgtttacggtaaaatatgaatacttgagtgacaataatcattattatagagatttccactttaaattcgattagctagataaagacctgtgcctccacacccgtgtttctgcttctatataagccacactcttaaacggatcattcattgacttgaaaagccatcgaagcaaaaacgcattccacacccatcatcacatttcgtcatattatttccacataacccgcactcgtgggaactcacatagagagagaagttagttgctacctacgccttgtgtgtgtgtgtgtgtgtgtgtttatggagatcattgccaccattttcttttgcttttttctcatcttctcatcccttattctttcgtatccattaatgaagaaacacaagaaacatcaacacgtagtaccaaagcctaagcttccccctggctcaatgggttggccttacataggagagacccttcaactctattctcaagaccctaacatcttctttgcttcaaagcaaaaaaggttcttgttatagtttgatcctcttcatatgatcatttttttatttttttacaaaacttcttagttacagttccttatgtactcttgtaatgatagtgttgttctccaatcagaatcgaacttttacttcgatgatctgcataataaatgtttgcatgcagattattgagatgaaagtctaattctaattaaagaactacatgactagtataactaaagaactattgttatgtaatcagaatcgaactttcactttggtgatctgcatatataacaaatgtttgcatgcagattattgagatgaatgtttaattaattctgattggaggaccgtacaaccagtgtacctaaaaaactggatctaagttgtttttttaaaagaaaaaaaaaaattgcatggaacataaacatggtggtggtggagctaatctaacttaattttcacaacattctttattgatcagatatggagaaattttcaagacacacatactaggttgttcatgcgtgatgttggctagccctgaggctgcacgttttgtgttggtgactcatgctcacttgttcaaacccacatacccaaaaagcaaagagaagctaataggcccttcagcattgttcttccaccaaggagaataccacactcgtgtcaggaagctggtgcaatcttctctctctcctgaaaccatccgaaaactgatcccagacatcgaaaccgaggtcgtttcctctttggaatcgtgggtttccactgggcaagccattactgctttccaagaaatgaaaaaggtcggtttttgatatgatacgatatgatgtgttccgagtttgtgagcctcatttttgcttgctgtttgttgtagtgggtctctactttgggttttttctgttgtcttattcgatatgcttttattgcatggcgttgaattttgttttcatttgttggttcctcattaattttcttgtcactggggtcctccattattgtatggtgatgtatgtacgattgatttctcaaactgatcatggccttccccttaactctcttcttcttcttcttgcgcagttctctttcaatattggcatcctctctgtctttggtcacttggaagacaattatagagaccagcttaaggaaaactactgcatagtggagaaagggtacaactctttccctaacaggattcccggaactgcatactccaaagcactcttggtaagttgaagatggcaaaacactctgatacattcttttgaacacttctctactattggctgaaatatattttaaatcacaaaatttagtggatgccactgatttcttatttaaggagtcttattccatggttttgtagttcttaattttagtcaataataaaaataatgcgttaagtaatgtgatgtttacaatggtctagtttaattagttgaataaaataggtgaatttttgtaaatttatgatacttattttttatttttacagataaaaaaaataatgtgatgattggactcctctttattttatattatattatatatatggtttcttactgttggtctaagaaaatcatttgatacatgggatcagattctgtctcatgtctttgtctgatgaatgtgttgtgaaatgatttgaaggcaaggaggagaatcagggagattataagtgagatcatttgtaaaagaaaggagcagagattgatggagagggatctattaggccacttgctgaactacaaggatgaaaaaggacaaacgctaagtgatgaccaaattgctgataatgtaattggggtactatttgcagctcaggatactacagcaagtgttctaacctggattctcaagtatcttcatgatgaccagaaacttcttgaagcaataaaagtaagacttgttttttttttttgtctcccaaaaagatttttcaaatccttgtaggccacaagtgttgaaaagtttatgctaattaatgagtcaatggaactgtttttcaggcagagcaaatggcagtatatgaagctaatgaaggagggaaaatgccattgacatggggtcagaccagaaatatgccaattactcatagggtatggtatatactatatactactgctgtaaatgtgatgcagcaagacaattctcatgtcttagttcaaagtgaaagtaacttggtgaatatatatttatcattaggatcttttatatattgcaggtgattttggaaagccttaggatgtcaagtatcatatcatttacttttagggaagctgtggttgatgtagcatacaaaggtaagaaataatttgagacagaatataatatacgttttttactacctgtgtatatttataggaattttaattttcaaatcattttactatttcctacgtgacttctaaaatgtttggtgcaactgttaaaggatatcttataccgaagggttggaaagtcatgccactgttcaggaacatccatcataatccagaatttcacccttctcctcacaattttgacccatcaaggtttgaggtacgttataatgctgaacatgaatttgcccaccacttagtcaaacatatattagaaaaataataacaaaagcgaaaccctatatttctcttctgaacacatatatttcactctgtgtggctgcaggttgctccaaagcccaatacttttacgccatttggcaacggagtgcactcttgtcctggaaatgagcttgccaaactgaacatgttcattttaattcatcatctagtaaccaaatataggtaaattttcaacttcattttgtattcaccaaaaacaaaaaaaataatcattttatcaaattttgatatcaagttttttcatcctttaaatattttttcattattatctaattacaaatatcatatatgacaaatttgttaatctttataataattattttaaaaattatatttaacttttttttactagttcaccgtgtaaaatctcttatattcacaatacatagaaattgaactttttttaaaaaaaatatttacatctgcagtatcattatcatcaaagtgtttattacctaaccatgttcaattatttggatggcaggtgggaagtagtgggatatcagaacggaatccaatatagcccattcccagtccctctgcatggtctacctacaagattttggagaaacaaatagaatcaaagatgatcatcatatgataaaatcttcctttattcatatataaaatttagatattccttgccaccccaccccaacttgatattgattgctcctgcttaacccaacacaaccctcctgttttaaaagtgagggtccaaaaaaattggtctcttattagcttcttccaagtaacatcatgtctattatcctatttgtaagtaaatggtggaagtggcatatatagcttagtgccattaattagtctgagcgtgtaagctgtactaattagtggcatataataataataatgttatcaactaatgattttagtttaattttgagctctattgaatggtcctatgattgatatatataaccttttgtaagtcaaagacttgtcttggattccagtttattgatttcaaggagactatagaccctgcatatggtccctcatgatatatttactcgtggatctatagtacgaagtttatatagcttcattattgtccttccatcttacttcacaaacacccgttgacaaattaaacttgtaaagattggaacattaaatcacaaacataaggtaaattaatgttaataagtgctcttagaatattgatttaaaaattaaaaaaaatggatatacaaaattatattttttatgattttttgatttcataaccagtattcttaactaatatcataagaatactatttaacaagaactcaagcataatactaaaaatggatttacattttacaatagtgcttagagtgaagaagaaaaaagtaaaaaaatataatataatatgaagagacatagaagcctaaaaaaataaaatgaagaaatcttgaaagaaatataaaatgttaatagaatgtttaaaataaaaagtgtcagtgtatcattattttttatcataatcaaactcaagatgcaacgtggctccattggaatggttgatctttcctattgcttcacgtagtagtcacaaggtgtgattatgagaaagccacgtgttgctgattaattagccggctgaaaaaggagatgcccttagccagagggatcttaaacctttctagggcatgaagcctgttcaggtttggtggagaggcggggaccaaaaatagtacatcacattattggaccttgtggattggttggagattttgaagctactgctactgtgcctttgccatttacacagtggatcaaaagtgatatttttttaagggcaccctctattttgtggtaccaacactaatagtttcatacactatcagccagtgtctttttcaatgttcatatttgatgttatcagtttgattcccacctgatcttctttcccttaccttttaacttgcagaaaactatgtaacaaaaagttaatttattggtaataatgtgttacattaacttaaaatatcataaaacaaaaaggggggtctcctcgcttgatgatcccaccagcttccttccattaagggtgggtttagtggtgttgaagagaaaaagaattaataagaaatatttaaattaagtaaagagaaaaagatatgaaacacactattttttaagaatgtcctcacgtatagtattttcttgacttttttactaaaatgagttaaaaatgaaaactaataaccataatgaattagtcaaaaaatatttattagaatgagtaaattttgtcatgtaaaatatagtaggtgttatatatcctgaatgtcaccttttgctttttgctaacccgaccttcaacagaaggcgctacttgatatactttatcctgttaattaaatacttgtttaatgattaaatcgtacctgaggcgtcacttaatatattttatcttgttaagtaaatacctgtttaatgaataaatcacatgtcagttatttcacttagtattttgaaactttccttaagttttagggacaaatatagaataatattgagcaattaaattgacaccccgatatgatttatgtgaaatttatatgatatttttgctatactttcttacaaagacatacaatgtaatgcgtttcttgaataatagatatggttagtagttagtaatatttttttttaaattttaaatcctcatgtaaccttttaaaaaaaattactcactataaaaaagtattaaatattatttttaaccaaaatattttggcttgtatatttaagatattaatattttatttagtattttctttataaaacttcaggagatatttttaaggaaatgttatagaagaaatatagtcattatacatatattttgcatcggtttaattgacctaaattgaatgaaaatgtgacatgagatataatcattaaacaggaacatattaggatgatgtctcttactacatgaaaaacaaaaaatacaataagttactcaaaataagtctggtatattaaatgacaaaaattatccattttattaaatattttttttgacaaacccatattaataattaatttttatttttaacccattttggtcaagaagtcatactttttttccaacaaccaaaccaaggctaaagttgagagagctcacaaatattttttactttcaaagcagcagatttttccttctcattttatatgcattggaaggcgtaattatagattaaaattcacaaacatactttttttgtaacttcaaaccaaacaatagtctaggattctgatctttctttttacctgagtctttataccccgttcacaaatttctgttgtgcctaagctttttaccatagtctcctgatcgtggtcccgaaaatggaataatctcgttacaagagctaaaactgtcacttgcttaaactgtttatgaacctcaaattcatttatttgattgaacataccacaatttgtgtaggagaaaatttaaaaaaatttaagagagaaaaaaagagaaacataaatatgatttacatgaagacaaggtatccacagaccacagatatgataaagataacagattaatgtctcaatgcaattaattgatgtctacaaacaatagaacagccaaaaaacttatggccagggagatagagaaagtgagtatctaatattatgtaattcaacaaaacattgcagctcaaaatctggggttcctgtcaaccaaaaagagagctaaaataagtatatataatagggtatacatggtcattcaaaagcaggtttccttagtgaaattcaaatgaaataaccacttacgtgaaatattacattatatatataggcaacatggctgcacagaagggagaggcattttgcttttgttacataccaaaagtatatcatgaagcgtgttttgtcaacaatattaaagatgaaatgagttttaaaaaaacatgcaacataaattgatacacatcccatcattttgctgttatatgcgatagtattctttcaatttcattacaataaaaacaattgtacaactgctattcacatggcagcgtcaacatcattactgtgatctcgttgtcattgttgccgccaccatgtaacgttgatgcccctagctagcttcttcaacatagtctattcatgttcataaccatttggtgtaagagggtagcctattatatatgaagtgtaaatttacagaagcaatttttccaagatcattcaagtgatgaaataaatcaataggaaattcaacaaatgatgaacttaatcaaaatttgaaaagatcaaaacagtttaatctaagtttagggtattttgccaactatgctaattgctatataatttactggtttgccaactaactttggcaccagcagagaaacaacgataaaatgaaatataagaaacatcatcgtcatgcttgtactgcataatcatcaaacgacaaaattataattacgtttcaaatgagaaaattatcagcagatacgattcgataaccagaatatatatgccatgctgaaatattggtggtcaagttagccacgcacctatagaggatacagccacacatagttttcacaaccccactttttcagaagagacaagatatataaaattgcagactatcaataatcaatagtataatatatcatattttaccgttactgattattataagatgatttttagaaattaatttattatttttataagattatttttttaatttttatatatattatttttttacatatttttatttaattattttctcttcaaaaattaattaaaataattaagtaaacagagagataagaaaaatataattttaaaataataatataaataattaacaaatttaacatgattaattaaattaaatattttttaaggaacatgaatttattggaaaaaaaattataattgaccacgatggagtaaaagacagctactgttaagtttgatgattgtggtcagacaagtaatactccagaattatcgccataacacggacagtttcatgaacaataaatagataaaattttaacttattatgttatccattctaattttagactacaactctcagtctatctggatctacaagcatgaaacattatataccaatctcaaatatctacaaacctataatatctttgtttttctctctctttctctcttattgggaggtgtatcgtaggagagaaatttttaattttctgaaaatctttgattaaaaatcttaatttttcatgtttaatatctgtttaaaaataatatttttggaaaaagtgttttctgaaaatgttttttagctagtttttcacaaaatttttctcattaaaaaggtgggaatctaacttttcaagagtaaaatttttgttttactataataaaaaaattattatgctactcttatcagataaattaatatgataaataattaaaagtaattagtaaaaatatcattaaatctttgatattaaggaaacttatataaatattatgcaaaatatatttatgatcaaccaaataaattttatttattcagaaatcatgattctcaaattcataattctaagatataaaaaaaattctcccataccaaacgttccttaaatattatgcataatatttgggaaaatattttttgaaatttttttaatggtaataaggaccaataccaattccaaaaaaaaaacgaccattttctaaacatgggccatgttgatgtccatcttgatgggcttgagttgtcctatttannnnnnnnnnttactagttacataaaaaaactcaacggcaattgaaaatgtcaagaagcgatgttacattcagcttaagttggtgaaaaaaaaaacatagtcgtatgattttgttttacattatataataaaattatactttcattgtatattgactatattcaatatgtatctcattttacaaaacaaaatcaattctgttatccattttcttcgtaaatctatatttataatggaaacacaattccctgcacaagtgagggtgtgaatcccaatttcgttgcataatatttgggaaaatattttttgattttttttaatggtaataaggaccaataccgattccaaaaaaaaaaaaaagaccattttctaaacatgggccatgttgatgtccatcttgatgggcttgagttgtcctatttaaatttgaaacacaattgacctttttttattctaaacttttcctttacatgttattatgttaagatgattagacgaagagattgtgtgtggttctctatattgtgtttctctttcgtcttatgcttcaatagcacgacgtgtttctttatttgacttatgtttttgtttgtgttttgggattctagaaaaaaaatattagtgaaaatataataaaaatatgcaccaccgataataaatacaagaaatatttacacttgtcgtaacaaaacactagcttttacagttttttatttataaaaagtcaatgataacttttttttattgttccctgtttgcaagctttgattctcatatggccacttaaccttctgaatcttactgaaaagtcacgatctttttttttttctttctcttccatattctttcaatactcctacaatacaaggaagagaacatgaaaatattagtatcaggtctgtttgagtataagtttttttggaagtatttttaaaaacagaaaaaaaatgaaatgagtttctccataagttaaaataaatttttcatttagatgtcatttcatattttagagaaaagttatatgggtgagtttataaaaattagctaatggagagtttatttttacttatgaaaaaatttatcattttttcttcttattttcttcttttaaaaatgtttctagagaaatttatccaaacaaatccattaataaatacttctacattctcttctattggacttaaagtttttttttttcatctttcctcattgcatgcccactagaagccatgctcaaaagatttgtttgctccattattactgtggggtgattgttagattattgatatgataaattaaagttgttatgatttaaattcaaattataaatagatttaaatttaaattataaataacttataatttattattcttctctatatatattgtacattcatatttagatgtgaataaaattctaattatttcatctttcaatatgagataatcttttttcttgttgaaacggtggtaatgttaaatgaaataataacaactttaaagtagattttattttttgttgtgttattcccaatttttttcgttttatctgtcggtacttctccattttccctatttgcccgtaaataagttgagatggtgaaatgagtgttgttattaaatctgattatattgataccatcagctaattcaatgggttacttttaacaattaatacattaaatatgtgtgtggtgcttgaaacttaatgaagaggcttcgcatcagatgcataagaaacaacacaggatgttctaagtgtatttgatttgttttctgcactgtattcgagccatttcgttgcactgtacgtgatataaatgcttctcgcgctgtgtttagacacgtctcgcaaaattacaatttggtttatcaaatcaatgtattatagtatggtacccgtgcttaaacagaataacctatttgagtttaacaacaaaatctattaaataatgtagatttatgtgaataataattaaaatattaataaaaattaaaaaaactttattctagtgtatcttatactatatgttaattatattctcacaaatttatacatataaattatcactaatttttattttgttcaaactaacatatttgtatgaatgtgtcattaatatatttgattagagtagctattattttgaaattgtaaataattaaaagaatgtgttgtgatggtataaaatgatttgctatataatctagttacatcaataattggacttattgttagaattatgttgagtttaaaaagtagagaaaattgttgataagagaatttataaatagtttagtatattgataacataaagttgaacaaccaaaatagaagaacatgcatatgttacacaattgtgaaaatgattgaaaagtttcttatgataagttattcgtttcaatttctctcatggcattcacgactatcatcaggaaatgcataatactgagtgtactatatatcgtaatgcatgacactaaggtaggttatctcactaaatgccttatgtatggtgtatattgatcaatttcttattcattaacacttttgttttgtgcaatgacctgatattcggaattaaatgatgctcccttggcatgctcacccaaggtagctctattaggtacctaattccttccggttggttgtgacgaaggatagtgcttcattgaagatacaccatatgtaatatttgaccctggaaatgaaagaacaaaataagtttgttaaacataaatttagagaacgtgataaatgacattatttttgttaacatagatagtatgtagataaagtgactccaaaagcaagaataattaaacctgcaatgtatgccataattaaccagccgcctgtttcaaaatgaaaagtgagagaaaaatctaagggagggggagaagaaaaatctagagtcatctcattcttttttttttctttcaaaactcaccatacggcttattccatttctcctccatcagctcactcaaccaagcccaataacaacttacagcccaattagttgatgtgtcccaatccatgtgctccttaatgatgttgtcatcgcatatgcacaagttgctgaaatttattttctgtgtcttcagaaattaggagttagaagttcaaaattaaaaaatctctaatttcttcactatacccaattgactaatgtgccctcaacatgtcacatgttgtccaatttaagaggctataaatggaattgcatatgtctacaactttcatatatgtttaatagatagatacattcttacatgatttgtttaaagtattatgcgtgatcgatctagaacattttagccaagtcaactttcgtaataataattctctttcatgaattctattattgaaggtttaaggaacttttaaacattttgttatcatttttaatgtttttttttaataaatgatgctttcccgctacaatatcccacatatattttgtgataaaattactaataaattgatttaggcacttgctgagatgattaagtttttaaaccttttctcgtcttcctttgattacatgtggtggaggaaaatcaaatgcattcaggnnnnnnnnnnnnnnnnnnnnnnnnnnnnnnnnnnnnnnnnnnnnnnnnnnnnnnnnnnnnnnnnnnnnnnnnnnnnnnnnnnnnnnnnnnnnnnnnnnnnnnnnnnnnnnnnnnnnnnnnnnnnnnnnnnnnnnnnnnnnnnnnnnnnnnnnnnnnnnnnnnnnnnnnnnnnnnnnnnnnnnnnnnnnnnnnnnnnnnnnnnnnnnnnnnnnnnnnnnnnnnnnnnnnatgctttcccgctacaatatcccacatatattttgtgataaaattactaataaattgatttaagcacttatttaatcacttgctgagatgattaagttttaaacgttttctcgtcttcctttgatcacatgtggtggaggaaaatcaaatgcattcaggtattttttactaaactcttttttttttatcaatattggtatatatgtttggtgccataattacatatgatcattctaagctgaaagtacgcagacttaatttatcattaacccatcttaatttatcaactcttagttttttttcatcataaaaggatgtcaccatttctcttttagatcaagtttattctcctatagctgcgtattatgtttttgtacctggcaatttctaccttcgtgatttgataaacatacaagtatacaataggtctggcacagtaagaaaatggaaaaaattgaggttaaataatcatactaacatattcaaatctcttaaaagataagaaatatcaacatgctggaatataattaataaataaatttatctcttaaatatgtaatgaaaggtttaatctcatattcaaatctaaatatttcgagagattaaggcttttgacagaagaatactcctagttttaaaaaaatatattaaaggggaagtaattggttagagcaatggaaatattgagagaatagaatattgaaacttgaaccttgaaagaaataaacaaggggttgttattcgccccaatccttttttatattggtccttagagcatttttagtggtagattttaaattgagatcttagatcactttttggtagaccccatagtattatgtaggattgaagatctctcaagatccctcctattttgttctttaatggtagatcttattttgagatcttaggaagagagaaagagaaaaaaaaattattcttttttgaataatgtagggttcttctacaagaacccattctccatattggagatctctctacctcttttattgagagatctagtgaagaccagatcttgagctcaagatccttactcaagatcttgtactaaagttgctcctaagggactgatatgttttttttatctaaaaatattattttcatggaaacataaatgtataaggggattatatttttccgttatttatggagaggtgtaaaaaaataaacaatggaaatgtcattgtgttttataattatacaaccaaattatatttctgttattttattattttttgaaagagttaaaaaaaaagtgacaaaaatatgattttgattgcatactgtacaacataattatttgtagcgctttttaaagggtgaaaaaaaaataaagaatataattggattttgttgtttatttttttccaaccaaaccttcgttgtcaatttctctcttcttctgcatctgcatgttggagcgatggatgtggtgaagatctcgggtcgatgggtctagattgatggcggtgagaatgcgtagcagcgtgaagggaggtgcagggccaagggttcacacggtgttgcagtggcgcgatggtggttgggccaaggggtggcaagtgcagatctactattggggcagtgagcgacacgacgctgttgcaacgacattagaatcgttggggtcagatctggacgaaggtggtgatgcgcggtgttggtgcgatggtgatggtttgggttggatgaaaagaaggtgaagaagaaggagtaaaatagtcttctgtttatcttatagggaccaataacaactgagattgagaacaataacacctcaactctcaataaacaactacaaccagatttatattcacgtggaaaagaaaaatgttgtagaaaaaaattggctaaagatgcgggacgatgaataactcattgccacgtggacttcttacaggtcccacagacgggcccgcccaaaaaatgaaaatttagattaaattaaattaaaggatctcactaggaacaggagctataaataaagtggtgaagacgattaatggaaaaaaacaaaaacaaaccctctcagcatttgtgtttttgcgttgcaattgcaagctccctgctcacacttcccctcctccgtcgtttccttggcttcttcttcctctgaacgcaatttccgctgctgcaactccgaagccgccagctcagcatcctcgaaatcaggtacgaacccgatctcattgtgaagctgatattgctgcatgaaaattcttcttgtgtttcttcaacgttgtgaatgatctatgttgtgctgttctcgctgcaactgattctgtttaggttttgtttctgaaaagtctgctgctgcaggtggttgcaatctggcatggatttcctctggagcgagaatgcggcgacgccgcgcgcctcgcatttctccgtcgcgatctacttcgccttcgccagtttcgcggccaggttcttccttgacagattcgtctttcgcgtaagatcctttgtttgtttgcgttgcgaaaaattcttattccctgacggattggatagcttgtttctgttttgttagagatttaataattaaaggaaaagagaaaaaaaaaacagcttagttctggattgtgcttgttttgttgattctccattttagggttccttgtaagagactgcagaaactgtgtcggttttattagtaattcagcacaaattctcttgagtttggtgattttttcttcttcccgtttttggctgaatttactaggtgttagtttagttgcctgaaatttgttcatattggttagaggatctttaagttcagttggagttaattgcacaattgaaagttgaggcatcaatgtctatatctaggaaaacagtctaatgcaatgctgctcatttatgtcgagttaaatctgtatattgatatgcattgatccttcttttcttatttaagttattagccctttttgacatttaattgttgttcttagcttacatatggcaaaaatatatgattaatgatttatacttcctctgatgttgggacgcggatggtcatgggaagtggtttcctatattgccaaatgatgaattgagtgtggcttttgtgcattatctttattttttctcatgaatgattattacacagttgatttatggttttcatattctgctccctttagttgccaccatgcaacctggtttgttggtagacattactttctgttcttaccaatggaacaaggagaagctaaaagaaagacactgttgtttgtaaaggattttagaagaatatccctattctcgaaatatgtgggaaatggcttggtcattgtcagtgttgttaaatggcagtgccatggctgctacggaagaatggcatggcagattttttgccaaccaccataggcaatttgttgcgggaggcccgctatggtggcaccatagtccgcaatggcattctatatggcggaattttggccttccaccatattccaccatccaccattgataactttggtcattgttgctgttcttgtatcccacacctcaaaatatgtagaaaaaaggtgctgtaaaccatgatattttgttgtgtctggaagagatacatgttagaaaatatgaaaagaaagcactttgtcaaatatcaaaggtttctttcacctgttttcttgtgaaaaatgtatgatagtgtattgcaatctcatactggcttttcaagatgataggttaaatgttttctagcaaagcacatcagcaaggatgatcaaagacttttaatgcccaagcttgttaattttctaaagtcttacatgtttcatgaaatgtgtatggatcattttggttacctgtggaaaaagcattttttggaagcaacaatgaccaaccttgtttcatttaaaaataattctaaatcctcttatatcatattcttactaatcctcccacttactaaatgaaaaaagtatttagtgatttttatttttcaataatattaaattcatttaccttttccttccttcactcttaaatattgttgttgtttacagaggttggctattaggatgttgacgaagggtagagctcctttacgtattactaaggaaatgcaagtaaagattggaaaatgctcagaatcaatgtggaagctaacatattatgctacagttgaagcattcgttcttaaaattacctaccaagaaccctggttcagtaatacgaaattatacttcaatgactggccaaatcatgagttgaagtaagtattccatgtagcatgatgaacaaaatctgtctagtcggtaaaatgtttttcccagatattgagtggcttgcatttatcttgttgaactgatctatttgtgtttcttaggaaaacctcaaaattgatccttattttcctcatcgattttctttactttacatcttaaattttgtcatgttatgatcttaacctaattcataatttacagacctgagttcacaatgaatgagtaagaggttttcagaaaccaacaattgctccttgggcatttttggtttgaaaacttcaaaagacctaaatttagtctttttctatttttacttttgatggactactaggtatgtgacaacaaatttcaagagtttccaaagcaatatacagatatattcctccctttgttaacaatgcatataactatttgttatggtttatattatataggctatgactaatttagctccttgcttcttctggcttgatgccattggttgcaacttgccatttggttctagcagtcaagtctaactcaaatggggagaacttgtaattgtccttaggaagttgtttataaggctattttactcatgattttgtggtaaatagaagttggcatattaaaatttatattgcaccctgttttatgtcttatctcaggagtcccctagtgttgtactacatgtgccagtgtgggttctacatatatagcattgctgctattcttacatgggagactcgaaggaaggattttgcagtgatgtttactcaccatgtaattactgttttactgattgggatttcatatctaacaaggtaatatgttgggggtttccaacaatcctttatttttgttgaagaatatactatgcctattctacataaaccttaaatttgtaacttcgttatttattgttattattttacataagcatgaaaattctcacttggtggctcatatttgatgctcattattgataacacaactcaatcagctctagagtgtttttaacgttttagatctgttatagaatttagacattaatgttttctgttgcccaaataatattcataactgtaggtagtgttgttaaaattaataaattttaagtcttggtttggaaatattttttgggatttaccatatgtttctactttctatcttaaaccggtgtagtttcctgaaatttcattccttgctctttttcttttttcttttttaaatttaactggatggagatggaggtccatttaatcatgcttacttttggttgtataaacaaaaaggtaattgtatcacatggccttcttatatttatgtcatatgataaatctcccattatttataaataatattaaagagcctgtattatttcttgaggctttgtttggatatctactgttgatttgagaggaatggggtggaacaaaatttagtggatggataaaaaagattgattttatcccataatccccaacttgaagggggagaaaagagggattggatggaatggagtatagcttgaaacttctagtcctagataactttttagagcattaatacaagttgctcagaagtcacaaatttttgccatatttttatgtctggcatattggcatgtattacataattacataacctctctatgcaattaaactatctgacttcattacttaatagatttatgtcttagatccgagtctatgtaaatgcttggaatctctgatagaactgagaaatgcttgacaaatcttccttttctattagaatgttctttcatgtctgctttcttcttttgacttcaacttttttcaggttttgctatatcaggttgagtgatttagataattgaaattgcaaaactgacagtaacgtcttagatagaaattatgaagagataacttacacatgctgcatttacagtttttttagggttggctccataatccttgcccttcatgatgcaagtgacgtattcatggaagctgccaaggttttcaagtattctggaagggagtttggtgcaagtgtgtgttttggattctttgcagtttcgtggctcatgctgcggctaattttctttcctttttgggttattaaagcaacaaggtgtgtctttttttaaaattttatttttatcatattcatttgactttgttttgaaaggcacttactaatcatattttattataactgtgtttccactttccagcattgatcttcagcaggtcttaaacctgtcagagggctttcatatgtttctttactatgtttttaatacaatgctcataatgctgctcatcttccatatatactggtggaagctcatttgtgcgatgatcttgaggcaacttaaaaataggggaaaagttggcgaggatataagatcaggtatgcagattttatgaatacagattgagtgtattgttagtattctattattcttttgtttaggaaccagtccactgttaggacttaggatatgttccactgagtttattcatactatcttgcactgaatagtactctatattctttttttctggagaacacaatctaaaaatgttacttttgtgtagaatgttgcaattcctgatctttacagctctctacccagaagaaaatataacctagagatattattggcttgttttagatattataatgtgtgatcatggatcaataatgttaggggtacagagttgaattgctagttgctgaatattcctgttatatccctcctagtttatgcatgctcataactcttgtctgaatcaacatattggattagttaaatcatgatattttaaaagcgatgattactatgatactatcacaactgtatctggttgttgcactcaatttcctgcatctacagatctttacttttgtcatcgtcttgggtattacatgtactttattttagctgaatctgtttatctttatgcagattctgacgatgattgaatagacgaaaaagggttttgttgagattctttcttcctgctggttggtggtagctctgatgatactgtttttgacttgtctatagatttctaggagttcagttggttaatacaaccagtggaggagatctgaattttcgttagtttcaaaattttcattgattaccgagtaaaaagggagtaggaaaccgtcaagcatattttgattcttatatttttgctgtataaatgataggcattcctgtataattgtttttctaaacaaacccgtatagcttaactaggggttgaatgaaaagtggcttataagaaatatggagaaagaaaaacttagtcatattctacttttgtagttgcgcttttgagcaataagccgcagactggtgcatggtactgttattgactgcatgtttggattaacttcattttattttttgttttttttagagtttttgaaaacaaatgttttttcttttaagctgaactaaatatgctataaaactaacatgccttgtggatgtcagtttatgtaaatttttgaagatgcggctttattggaaattccagtttatgaaacaaatgttcagattttttttttcttttttaaaacatttctttgtactaaataagattttgccagtcaaagtgttctgctagcaagagaatctcttttgtattgaatgtgtatttatttacttaagtgtggaatgtaccaaataaacaaccaataacactaccaaaaaaacaagaaattctaaaagcaactaggaatttaataccatgaatgaaagcttttattactttcatttcttgatgttttatgttctcatgtattcatattcatcatcgccacttcatttattttagaattctattaaaacagcttcactgtattatactatgcatgaaattggtctccttaggatgcattccctcgtgggaatgctttagaattttaactatcacttgttgccactagtcgtttcctccctgaaacgtctccaccgatttttctcgagggaaaaagtttgcacggttattttcccagctttcctagttgtacttcctctatttaaaagaagtgacattattatttaaagagtgaaacgattttattgaattattattatttattctctattcaagaacttaattccctcacactaactattcgtttggaggaaaatcggaataaaatatttaatgttttggtaaaaatctaaaacgagactaaatattttttttagtgttaaaatatcactcattttcaaatggaggcagcatgtttcctttctagattgcactatactagataatctgaatctttgtggcgtctctttctttgatatacttctatatacgaaagaaagtaatataacaggttcaattccggtgctcatttttatactttttcagtggcactctacagtctctacttgacaatctgggcctttttttggcaactccataagcgtgtttggcaagaattttactggtaatgtatttgacgagaggatttaaaaggattttgtttatggagttgctattggccccaataaatgttgttataggtgttagaatttttatatatttaatgatctaacattttcacaaataatattagatcaatacggaataaaataaaatagaattaaatacctcccgccattattccttgaattgggttgtaatacttcaatgtgaagtgatttcttgagtcttccaaactcttctcttaatttgcactagatgatgtatatgtacgtatatgtgagtgagttcagggaccccagaaattgaagacacacacccctatatatagaccttttccatcaaaggtgattttgtgtgtatggttagaatgggaagttaatagcggttgtgataaagggtagttaaccataggaatagttaaccaattaaggttggttacaaaataaaaccaacattctcccacttggttcacatatcccatcatttacataatgagaaataaaatacatgaatcatgactatagatcctctaatgtatgtgagtattatcttccatgtatcacattgcattatatttctcaagcccatataacttaatgaataaacccaacgtttattctaggttcaaactttattgatgtttttcaaaattaataaatttagatgcgcataatctgaatgaaaacatcacaatagagttttatcaaaacaatatcgttattacataaaggaaccatgtcccattctatctacatgatccttaaatttaaatggtggcatgcccttagttaaaggatcagcaatctttaattcagtgctaatgtgctcaataaccattgtattatttttagcacgttctcttatggctaaatatttaatgtcgatatgcttacttcgactaccacttttgttgttcttagtcataaaaacagcatttgaattatcataatatatcttcaatgacttagaaatggaacccataactctaagcccaaaaatgaaactccttatccatacaccatgtaaggtagcctcaaaacaagaaacgaacttagcctccatagtggaaatagcagtcaaagtctgcgtgacacttctctaagagacagcttcgctggctagcataaatatatatcctgaagtggattttctcgaatcaatgcaactagcatagtctgaatcatagtaaccaattacttccaaattgtcaattcgtttatacataagcatgtaagctttagtcctttgaaggtatctcatcactttctttgcagctttccagtggtctaaacctggattactttgatatctccctagtactccaacagcaaaagcaatatcaggtcttgtgcagacctgagcatacataatgcctccaacagctgaagcataaggaatgttcttcatttgttccctctcgagatcattcttggggcactaacttaaatcaagtttatcacccttcacaataggagctacacttggtgaacaatcacatatcctaaatctttccaaaactttatcaatataggtctcttgagataaatcaagaataccgcgtattctatctctatggatcttaatatcaataacataagaggcatcacccatatccttcatatcaaaatttttgtagggaaattgttttatctcaaataacaaacctttatcattggttgcaagtaaaatgtcatccacatatagaataagaaaacaaatttttctcccactgaccttccagtatatacattgatccataatattttccacaaaaccaaatgaggaaataacatcataaattttaaataccattgacgggaggcttgtttcaattcatatatagacttcttaagcttacacaccaatttctcattgtcactagagaaaaatccttttagttgttttatataaacctcttcctctagatttccattgagaaagactgttttcacatccatttgttacaactctaagtcaaaatatgcaaccaacgctaggatgatacggagggaatctttcttcgacataggagaaaatgtctccttataatcgatcccttccttttgattaaatcctttggctacgagtctttctttatatctctcaatattgcctaatgagtctttctttgtcttaaaaaacccatttacatccaatgacttttgcaccatcaggcaactgaacaagatccaagactctatttgatgccatagaattcatctcatcatgcttaacatcataccataaatttgattctttacaattcatggcttgtgaaaacgtttcaggatcatttacagctcctatgttataatcagactcttgaaaatacacaacataatcactagatatcgttgattttcttactctagtagattttcataatattgagacatcagcttcttgaggaacttgttgtttggctagttggtcaacaatttcttcatgttcctcatgaacaatttgatctactagatcatcagcaagttgtggatcctgtatgattggttgtataatacccgattgaactggaagggtgttttggacaacaaccagtctcacgtttgaagtggatggttgagcaactgaatgatccttctcagaaacaaaggctttgtattaatcgttcccactaatcaagtcattctcaagaaatttagcatttcttgattccacaatcctagtgttgtgagatggacagtaaaatttatatcccttagacttttcagcatatccaatgaaatgcacactaatagtcctcgggtcaagcttcttttcttgtaggttataaattctaacttcacacgggcatccctaaacgcgtacatgtcataaactcggtttccaacctttaaataactcaaatggcgtttttggaacaaccttagttggaactcggtttaatatgtatattatcatcttaaatgcctctttccacaagaacttaggaagcttggaactactgagcatacttcgcaccatatccaataatgttcggtttcttctttctgctacatcattctgattaggagaaccagacatagtgtattgggcaacaatctcatgctcttcaagaaacctctcaaatggaccaggtgcttctccatcttcagtgtatctaccacagcattctccacctctatccgatctcacgatcttaatttgcttaccgcattgattctctacctcagacttaaataccttaaaggcatctaaggcttcatacttattattaagcatgtagagatacatgtatcgtgaataatcatctataaaggaaatgaagtatttctgaccatatacgtccatatcagaacaacagatatttgtatgtataatctctaataatttagtacgcctcttgtcaccctttttagacttgtttgtgtgcttttccttaatgcaatttatacaagtttcaaaatcagtgaaatctaaagtactaagtactccatcattcactaatcttttaattctctgaatgaagatgtgtgctaatctccagtgccacagcatagaggaatccttattcataacacatcgcttaatgtcaacattaacatgcattgcgtcataagtggtatcattttgaaaattaatatagaaaagaccatcacataaaatatcattccctatgagattagaattataaaataaactgaaagatgtctcataaaatgaaaaggaataatcaaatggtacaagtcttgaaaatgaaattaaattcttagaaaaaatagggacataaaaaatgttttccgaattcaaaataaaaccacttcttaaactaaactgcaggttccaatggcttccacaggtgaactcatcttgttgcctgaatagatgcacagttcactgctcactggtttccttaagttttgcataccctgcaaggtatttgaaacatggattgtagaaccagattcaatccaccatgtgttataatttatgttaatcatattatattcatacccaaattcaggagaattctttccttccaaattaggtaatttgtcccctctcaattccggaacttcaatagaactaacatgttgtacaactgcaaattatatgcttattataaaaatttgaagcaaaaataaatcattatcatgctttaccaatgtaaaacatgttcaaagaattataaatttagtggcataaaatttgcctgtaggccaaaattttaattcaataaaattcatattaacttaatgataaaacatataagttatatttcctaatccctgtgggcaaatcaagagaataacttaatatttttatcctaattaatcatacaaaaacatgataaaaaatcttgtaagatgatatttatcatattacatacaactaattacaattaatgttattttccttatgtgatctaaaggctctgaatttataatttaactaagggtgttatggccaaatcttaattaattaaattataaagatcactaaacatttatttattcattatacatactttatgataaaactataaaattatattttccattcctatgggtaactcaataatataatttaatattttatcttaattaatcatataaaatataacaaaaattcttgtaggttaacatttattatatcatatatgatcaattacaattaatatcaattatgtgtttcctttaccaattaatcaacacgtgctttgccaaaaattttggtaaccttgcaaacatatatgaaggaaaccgagtttttttttacttttgatgctattttatcattttgtgccaattttataatgctttgttgtatcacatatataagtgataaactttcatatcacaagcatcttcctcgatcaaaacaagtacagtgaccaagcaaaattttaatatgaatttataaagtataagatgacaaaatagcatttcttgcatcataaaagcattgaaaacaagaacttgattttacttttcagagtaaaagtacaagaacatgcatattatcttgataatatcaaaatcaaaaggaattgtcgttttgaaacttaataaaacgacacacatttaagttgtcttcaaccttaagcaaaaagatatagaaacatgcaaaattttaaatcacggtttctaattttaaaaaacttcttttcatataattttacactgtttttcatgatttaaagtctagaatcattataaatctattttctttatgattcttaaaatcaaactttattttaagactttaaatcaaaatatccaataaaatccaaaaaactcaaaacgtaaaaacaaggtagaggttgaaccatgctctgataccaaatgttataatttttatatacttaatgatctaatcattttcacaaataatattagatcaatgcggaataaaatagaatataaatacctcctgccattgctccttgaattgggttgtaatacagcaatgtgaagtgatttcttgagtcttccaaactcgtctctcaatttgcactagatggtgtatatgcatttatatgtaagtgagttcaggaaccccagaaattgaagacacacatacctatatatagaccttttccatcaaaagtgattttgtgtgtatggttagaatgagaagttaaccgcggttgtgataaggggtggttaaccataagaatagttaaccaattaagattggttacaaaataaaatcaatattaattaatcataggaatagttaaccaattaaggttggttacaaaataaaaccaacaattggcccattgcattcctcaaatttcaaaattacttttccttataatacacaatggaatcgtgttgcactgaaggaggtaccaaaaggatgcagaacgaactcacgattaaaagataagctaaactgtaacaaattttgtcactatctgacatgaaatagaagactatgtgaagggattagaagatgagctaacttaagaaaagataatcaattttgccacttactgatattattgacctacaaaaacctattttaatctgatataaagtattgaacaacaattgagattggattttacattcaataatattgaggcgacaataattttttaattaaactttcacttgtttcagtttaatcaaatgtcatatattcgaattttgagtccacaattatgttaaatacttagaatgagaactttattgttcataataattctatctaactcagataaaattgtatccaataaaaaataatatgatttagaaaaaaaaatagtttcactcgacccatctcctcaaagcacccaaatttggtcgtcatcgtcaaagtatggatgaaacaaaatatgtgaatttgacaatatgattaagataaaatagtgaatctggtcacccaatgtgtatgacaatttcaagttagtctctaaatgctaataaacaaaaaaaaaaaaaaatccctaaaagcagtttttgtctttcacattttccttcgttttatataggatcatgcatgttatcattgaaatgtaatttagtccctaaatattaggaatgaactgcattttagtgacaacatacgatgacttatctaaaatgaatgacagagtgtaaaaaatgaaaacaactttcaaagattttattttaatttatttaagttttgggattaacttgaatttgccatatatttatgtgggaccaaattttccattcagccggtttggctttggtgcacaaagcaatgaaaaccttgcaatttcgttaaattgttttgctaaaagtgagaggttttatcgagaaaaaatataatatttttaattgcttcataaaattttaaataatctaatttagttaaaaatattataatatcaacaaattatatagttttctataaatatatttaattttcctgaagtaatttaaaataattaaataaaatacattctattaatctctttttatgcaattacttcgtttatctctaaataaataacatttcttgcatatactatacaaataagtaaagcgaacgaaaggcagttttgtgcttttgactaatggtttttctctattttctcgtgataaagagagtgtaattttttaataccacttttactgtttattgattttttttttgaataattaagaatagcaattttgtgcttctgactagcgattttaatcttatttgttcttgtgaaaaagagagtctagaaaaacaatttatgacttttattgtttattgactacaaaatgttgactaaactaagaataatttataaaaaataaaataatacatgatttgtagagaaatttataaaaaaaaaaagtttaagattatttcctcaacaaattcttacataagttgctaaaaaatataaatttacacaagatttttttcccttccattctattcaattgcctttttcttttttttttttcacagataattattgcctttttttcatgctaaaaattttaaaacttatttatgattttccactacctttgtatccaagtttccaccgagcactacgatgtacgatcaaccaaacacttcactatccaaggcttgagcctttcacaaaaacaataaaaaaagaagaagaaaagcaagacttgacctagccctgctctagaaacataacaaagaaaacggcggaaagttcacattcaaaggttgacaaaattaaataaaggtttgaccaagtaagagaaatctcatctcaatgtcaattaattacatttagacacgattttaactatcctcatatttgatctaaaattaaataaaaaaattatattttacttaaacgtttcaacaaaaaaaaaannnnnnnnnnnnnnnnnnnnnnnnnnnnnnnnnnnnnnnnnnnnnnnnnnnnnnnnnnnnnnnnnnnnnnnnnnnnnnnnnnnnnnnnnnnnnnnnnnnnnnnnnnnnnnnnnnnnnnnnnnnnnnnnnnnnnnnnnnnnnnnnnnnnnnnnnnnnnnnnnnnnnnnnnnnnnnnnnnnnnnnnnnnnnnnnnnnnnnnnnnnnnnnnnnnnnnnnnnnnnnnnnnnnnnnnnnnnnnnnnnnnnnnnnnnnnnnnnnnnnnnnnnnnnnnnnnnnnnnnnnnnnnnnnnnnnnnnnnnnnnnnnnnnnnnnnnnnnnnnnnnnnnnnnnnnnnnnnnnnnnnnnnnnnnnnnnnnnnnnnnnnnnnataattctaaaaaatatctaaaccaattaagtgtaggaaaaattaatattttttttatctgctaagttaattttagtttagggataataatgagtaaggcttaagtaggatattaaaatttacaatactcatccttgtatccacatttagaaaagaatattcatactcaggcttatgtttgcataaatagtatcattgatatatgtatatctttatccactaagtatttgtatacatatctagacctattacccgcattaattaaagggcctatgttcagaagttacatattgattttaaaaggagaaacaggaaagtgcaaatattttaattttaaggaattgtataatatatataaatatattatgcaggtataaataaggttggacaatataatacttatactcacaaatcttataagtaattactcatattagagcttaactcagttgatgggtatatatcctatatgttgtggggatttttgtaggtattcattgaatatggttctaaattgtcattcctactttattatatcagcaaacaaataaataattctaaaaatggggtacaaggggtactctaactcagataaaaaaaaagttttggagtaaaccaactgaaacgggctctatgacaaaaaggttttgtcgtcctactttagtcctctaatttttttctattgatttttttcatttttaaaatttttgttccaatatttttctcattgacacttccaacttaacagagttgtcctacataacattcttttcttgttcttctttgcatttctctatttttcttttaccaaacccactacttcgacaattggcttgcttccacagctccaatgatgaaccatatataacaataaccgcatgacaaggaagcacagcacaaagaagcaacaaaaaacagtgtttgtttgtgcactttaattttacccaaaaatcatcacacgtgagaaggagaagccgaaccccctagaaattgcatggaggaattgtttgctcccaagatatgttttgaatttgaagaagcatttctttaaagattaaggtttattgaaagacttgagtccaataatatacttataattttaggttcattattttatgacaaaaaaggttatacacctatctttgtaaaaagaaattagattatcataagtgatcatgtttactaaatttttaacttttataacaactattttaaagttaaccataatttgtaattaataataatgtaaaactattaagttagagtgaaaaatagattaaatataacgtaaaatactttatacttaaatatatatatatatataaaggatttgtctgatagaatgaattagataatgtaaattttaagcgcactgtcttaaaaaaaggccttaaagaaactccttgtaataatgtaannnnnnnnnnnnnnnnnnnnnnnnnnnnnnnnnnnnnnnnnnnnnnnnnnnnnnnnnnnnnnnnnnnnnnnnnnnnnnnnnnnnnnnnnnnnnnnnnnnnnnnnntatatatatatatatatatatatatatatatatatatatatatatatatatataaaggattagtctgatagaatgaattagatagtgtaaattttaagcgcactgtcttaaaaaaaggccttaaagaaactccttgtaataatgtaatttaatctatttttattaattttaaaataattcaaaataaattattacataaaaatatattatatttaaaaacctaaacatctatttaacaattttcattttgtaaataccagaaataattaagaaattatacaagaaaaataattattatttattgattaggaaattatttttattaattaaaatattttttaatataaaaataattaaaatataaacaacaatatttacatgaaaataataacaaattatgtaaactccgctgcgttggtagaaaaagtgaatattcaaaatttggaataataatacggatacggacaaagtttgaccttggtagaagtccagttataccctccttgatatttgatccagctgaggaacaggtcaaaacccaaaacactcagaactgaactatcctattctctcttcagatgttttgtgtttctcattttcctatctgtcacccttctggactccactctctcactctcatttaatacacccacgtgatcaaataactccaaaaccactaaacccacccccccttccgtgtatgaacggtgtgcacagctggaccatacccgccacgtcacccccaaaccgtatataaactaactcccactctctcatactcaactcatttccaaaaaataaacttgaacgcgccaaatacaaagaccaatgtcatcttcttccttctcccccgccactctcaccaccgagcaagaactctccgtcatcgtcgccgctctcaccaatgtcgtctctggttccacctccagttcctccgtcgtctccttcccgcagacctccgagcctctttctgccgccagcctaatgccgccaccgccgcctagcatcgacacgtgtcgcgagtgcaacatcgcaggatgcctgggatgcaactttttccccgaggaaaaaaagaagccgaagagagccaagaagaaatacaggggagtgaggcagaggccgtggggaaagtgggccgcggagattcgcgacccgcgtcgtgcggcccgggtctggctcgggacattcgaaaccgccgaggacgccgcccgggcctacgacaaggctgcaattgagttccgcggcccacgggccaagctcaatttccccttggtcgatgagtcgctcactctgcagcagcagagcgagccagagaggactgcaacagaagagcagattcagaacgagaataatctcaatcaaggcatggaaatggactcgcacgaatttgggaacaaggatacggaattctgggacaggatcaacgaagctgattttcatcagctcatgatgatgatggattttgctggagattcttccgactctgctgccactgggaacactctcagttcctgaaattgatattcaattaagccaaatcattagttttggtaatgtgtgtttaacaattgtgtaactcggctaagcgtagttgttaaattagcattagctagctccactgcatgcattacattacattacattacatgtatttctgtaatatctttcttccgctaggtttttttcgggaggaagttgctgcatagtacaaatcaaaagctttaatgtttcatttcgtcatccaagagtatgctctgtataaagattagcgtattattattatcatcatcaataatagctacttttaagagcaacttatcacttgtcactttcaatttgtacacttttagtatgatttaggatattatgcttgaattggtcaaatttgtctttattatgtttttttttttaatttttaaaatagctctaaaagagattctaataacttatgttgggtacattggagcacggctagttaagtgtttgttttggtgatgagaaaaatttggtggcagaagtttgacgtggaccccacagtgtatcacctgaggatgtagatgtcgtgtcttgcccactgggacagtgattctctttaccaagtcctaaagaaacgttacgattagtgcccacaatgattgtcacgtttacaagctgtaattgaagcacgttttcattttgtgattttgtcatgtgttcaatgtgttgaattcttaacgtgctggtttaggaatgggataaagtagggaatagggattaataaaaaaaggtatgaagccaaatagagaaagattagaataaaacgtttgattccttcccattacaaaaagctattgacgtgttgtgaacatgaaaagggagggtagttagctgagtgggtggggtctggaacttgtgttgtgttaactgattttttaattctttgatcttatacaatctaattgtttaaattctttcttatagttttttttttttaattacgtttgtggtcaaatcgcattgcttaaatactcgtttccaatacttaacgacatgacatactcactgacgcaaacatctttttgatgtggtctcgcggtttgtcgacttgataaaaatgttcaacacagtgatgataaaaatgtattttaatacattatatactttatttatacatataatttttttaatatttttctatcgcatacaagaacataaagttgtgtacaattttaaaaaatattcacaaagtatgtaaatgtaattttttcaattatttattatatttataaagaaaaaacaaataacaataatctttttttatttgattggaaagaaagttaaatacaaatgagaaaaaagtttatttctttatttcttctattttttttttcaattaaaaaagactaaactttttcttgtctcttcttattttaaattccttccacctaattaaatgaaacctaaataagtgttaattgtgtccaccaaattttttccttattaaatatttatgatgaactgatatgtaacttgattatgtataaaaatgcaagtaattatagatatttttaaaaaaaatgcaaattatccaagatattaaatgaatataaaataataaactttttttaatttgattggatagaaagttaaatagaaatgagaaaaaagtttattttttctttcttctatttttgtctctttaattcaaattttaaacttttttttcttgtctcttcttattttaaattcctaccacctaattaaatgaaacctaagtgttaattgtgatatggtgtccaccatgtttttccttattaaatatttatggtgaactgatatgtaactttattatgtataaaaatgtaagtaatgatagtcattttttcatagatgcaaattatccaagacattaaatgtataaataatatttcaccttaatgaaatatagttccttatttgttaattttagtttagtattaaataaaaagttgttttttcatataaatcatactaaacatatgactcacgctacgtatcatatgagtttttattgataaaagggccaaaagaccaagaaagggaaacaaaattaacgatatgtagtggctgcagaatcagccgccaagggtagagacaaaaatgtagtaggaaaaatcaaatattctacattctgttttcttagtagggccgtgagtagctatcagcagaggatcggaattatcttccttgcaaatgtaaagtgtttattagctcattacaaagagtattttttattaattaactgatttggtacaagtaattaatgttttaaaattaagattaaattatttaagtattatttgagtttaattcttaataaaaataattattaatcaaattttacttatttttaatcgaattgtaaatttcaaaatctctttttaatttctaatgaactaaagaattaaaagaattatttatagcttaacccatctgttcccctagtctcttgaaaatttattttaagcatttcaatttaattttcgtttttaacatgttaaaacccagtattagggcaagtggtaaagaaaaacaaaaacaaaaaaaaaacgatataaaaagaaacactttttttcagcaaatacgataattaaagttgggaaagagttatacttcaaatgtcctattaattttttcaaatgttaaagacatgagattaggtatgactgatatagaggggagctacacatgagattaggtatgactgatatagagcttttnnnnnnnnnnnnnnnnnnnnnnnnnnnnnnnnnnnnnnnnnnnnnnnnnnnnnnnnnnnnnnnnnnnnnnnnnnnnnnnnnnnnnnnnnnnnnnnnnnnnnnnnnnnnnnnnnnnnnnnnnnnnnnnnnnnnnnnnnnnnnnnnnnnnnttattagataatatatttttatttaaagttttcaaaatattaattttgtgtatttttatttagtattttttaataaaatattttaaaaatctataacagaatataacatatatactaagaagataaatatatataatggcgtgtgctactaactactatgaaaaaaaaaatcgagtgagagtagttaaacaaataaatctattccattttaggatagtttcttttagattgtttcttatcatttacaagaattttccttacagaagtacatcgtataatgtaattttgaataataaggttactaggttagtataatatatagaaagtgtcaacataatatatttccaacaattaaagagttacagtgtctgaggtataaaataaaaaagaagaataaaggtattaattttatttttatcaacaaatattaatagttaatttttttaaaattcatgactttttcttactttcattctccctcaagtcttagccactcagtccatctgatattcctaaataaagttattggtacaatttttagaaaattttcagaaaatatcagaataatatactattactataataaattctaaaaaaaattcctaatagtagttgacaaataaacgtcaaattctctgaaaccgtatggtcttatggattcagattacggttttgacgctactttgacgtccacggaaaggacgcagcttcaattatttacacagttgagtagttaggcgtctttattattacgccacactcattacgtcaacgtttcaccaaaaacaaaaaagtatgattacgtcacgctcaatcagcacccagcagcgatgtgtaatatatggatagttcacaaaatgacaacggaatattgcctccatcttccttcctatggatatggtttctttaggaaataaatcattaaatccaaaggaaaaaagcgaaacaaaaagaaaaggacaaaaacaaaatagttcatttattaagttcactaaaaataaaaataaaagaaaaacattagaaactaatattaaaagaaaatttatctatattctaataatataaaataattttacacgaacatttaataacaagatactaacagcttgtttgttgatttttataattactattaaaatatatattaataatgatttctaattaattgataatataaaaaaattatgattgatggtaaaaaaaataatgagatatgaaaaaacaaaaatattttgtcttttcacatacaaaaattgcattttcttttatcaaagtgggtccattaaataacgaacatttaaaggcagtggtccaaaacaataatatatcgaagacaaaaatgattcatggtcaaatttttaatgggctaatagtaatgaggaatgaattgcattgaaaattctcaaatttttatatgatatgaagtcgacaaactatcaaaatgtttgcgtgccttccaaaaaatatgatatttgcgtcactgaatatgtcatgtccttgtgtatttagaaaagagtattcatggacccaaaaaaggattgggctttttgctaagcaccacgaattctttaagaaaattgttattctcactaccaaaacatttgaaatcactcaattatgtggcaccccaagccgtcaagattcgagcagcatcgcgcgcccattgcctcgttgagatcaagcagtgctgcgcaatccacccctatcgatatctcatggcggagttgctttgtaatcagcctcagttgctttcgaaggctagttttgggtctgtgtcaaacttcatttccatgttttctttgttgattagtgaaatggtgttcgcagttatgtgtaggggctgtttaattttgatgcttttagattgacgactataataaatattagaatattttagtcttaatactttagtatttactgtttaatattattataaatgttggtatattttaatataataaattttagcttaaaaaaggaatgagaaaattttgaattttatatatttttaaatcattatttaggtcctgagagacttagaccaatctttttatttctgcgtttgacaaattagatacgaaattgagtcataaacgagacggagtctagggtacgcagcataaactcgttgcctaccttacgaaaggaatcccagttgttcagatataaaaaaattaaaattaaaggttaaggaaaacgaggattacgatagacatgcatacaccggattaaattaaaaaaaaaaattgctcgcctcttccctctgtcttctctgactcaccccgtcatcatcaccatgttgtttccggacaactacttcgacgtggtggtgtctggtgtgttcatgcacaccgtcagcgaatttgatccctcgtaggtggtggacgtgttcgtccgagtcaccgacgacgaggttggcgcggcgagttcccttgctccaaagatcggtcccttgggtctctcctcaaagaagatcgaagaagacattgcgaaggaaaccgcgaaggactggaagggctttcgcgtgacgatgaagctaatagtgcagaatcggcaggcaaaggtgacggtggtgccctccgccgtcgcacttgtcatcaaggcactgaaggaacccgagagggacaggaagaagacaaagaacatcaagcacaacaggaacatctccctagacgatgtcgttgagatcgtcagggtcatgagtcctccctccaagaccaaggatctcagtgaacccattaaggagattcttgggacttgcatttcgctagggtcatgagaggatgcgcacgtggcagacttggtgaaagtgatgaagccttgggccgaaagatgctagagaggtacgggagaagggtcgaataaaaaaattgatctaatgtggacacgaccataatatctcaataatctaacggcgcacgttcttttcgtaaggtacacaacgagtttatgttgtgtaccctagactccgtccataaacgagtcatacctatccatatatccactctaagaaataattagaatattgctattgccataaacaggtttcttttacgaaattatcgctaagaaaactatattttgatggtcgagatacacaaacaaaatgtattttcatttttgaaatacacaaagcacctaattaaaaaataaaaacaagttcaagcgcccaattttttaaaaattattcaagacctacggattaatttaaccgtaaatttatgatactttttatttttaaaaattaaaaatagataaattgtgactagtgatttatttttaatgtttttggtgatatataatgtttagtatttacttttgtagctaacacaggtaacctttttaattttaaatatttataacaagaatttattaaaaaaatcttaattcaatagaattatattttttctaacggcccaaaatcttattcaaaagttcaatagaattatatataagttattttaataatctaaaataaacaaaaataaatgaattaaaaaatgttacgagaactgtaaatcattatttttaaaaactaaaataaactccgtatgtccgtaatatgctcaatactgaatcaacgataatccttttattgcgatcaaaagagaaggaaaaaggtagaaactacaacggtggaattgcctgcctcttcttcataagcaattaatcctttttttttattattattatttgtaatcaaagaaagacaattcagtcagcaaacccaaacttgtaatcacaaaaaagaaagaaaaatacatacagggcaacctaaaactcactgtacagaaaaataacagcatctcagacttgaatacaagcaaatacattgttcaaacttcaaagacactcctaacactagaaataaatctgaaaccttcataaagaaaaaatgtaaacaaaggtttaaccatgtcgctttccagacatgctgatggagctgactttcataggagtagccaccaccaacggagcttctggagaatcactaaccgcaaatttgtcgtgcataaaccgtgattctacaattgactcatccttcaacactatcttataacagtaacagctcttcagcccttcttgattcctataacattcatgtgcactgttcttcacctgctgaaaatcccatatcacactaaacttgcccacagtcgcaacgaggtggcgttcttgtttaccattctcagtgacctgaaagacaaaaacacaaatcagataattgtgggttgctgcaaggtaatggactccgtaaactattaattatcatcagtttacatatattttctaattcgtatcacatgcaagtatgtaacattgaataaacaacgaattctatcttgagatgcatcggcactatccatacatatagttcacccaccaaatccatagcccaattaaaaaaaagcattctaagcataccacttgatgtagcaaactttgaatcataactcattttttctacctgcctaaagctacatcttacaatcaaccccatggtaatcccatacttgtttgcacccctcacattactcttgaatccctttcgtgaaattttttaaatatcctcccactacttagtgctacccattattgtttatcaacctatcatgttttcaatctgctacttgaatgtcttgctccaccagatcaatttcataataatgccatctgtgctctgacatggatcacaccatctctagactattattatcttcaacaaaatctctgcactttcacccccaggttcatacttaggatagaaatactcaaaacagtaaataataaggaagttactttgatggattaaaaacgaatgagttgttttcatcaacatctaaatacagagtatgcaactttatacataaaaaaacaaaaaaaaaaaagatgagtcctaaaaccaaaaagtaggcgccccaaaacaatggaaatatttaaaaaagacatgctagtttaagcaataattgtaaactatgtagttgattgaaactatttgttaacaagttccatagatcaaactgaatagaaacaagtttgtttcaatatatttgcggaagcgttattactttacaccaccaacaactaaggttttcccgtgagtttgcctacaagaatcatatgatgcccataattttctattgtaaatcatatgatatctacaaacaaattattaacctctataaatcctttttaatggtttatactaaagtttttctcaatctcctctacctctctagagatttgactaccctctctgtctctctctctaatctaatctccttaccaagtcttctccacacatgtccaaaccacctaaggcaagattctaccatttttcccataataaatgttctcctttttctccaatcattcatccctaatcatacctcaggacgtataaatattcttccatatttttgtaaagggatatgccaaaaaatctaggttcaccaagatcaatcaaagacaatcaaaaaccaagtagtgtgaagaaattaacaaaattgacatatacaagtagctacatagataagtatcaagaattaaaatcctaatggacatacaacaagtcaacaacaacaatggcgaatcaaacttacccacgagaaatggccaccgtgaaacttattgttcgcaccagccaaatgcgaatccagaggagtcagcttcaagagcctcggagcaggtatcctgttccccattctcccactaacccggtcttcgtcctcccatctttatccgtaaacaaggtgcaaatgagcaccaagtaagtatccgtggtaccaagcacccacttgccatcataggtaacatcaacactagtaatcggcgaaccgagcccgggaaacgccgtcttcgccatcctcatcgaggtcttcgagtacaaccttatcttcccatcaagagaccccacgacaatggacccatcaccagtagtcgcaaacgactgaaagttagtccctctggaaaactgatgcccctggctccaatgcaaaacaggcgaagaactcgccgtggcaatgttctgaacaattccctttctatccctcatgtcccattgacacaaccggttatcatccagccccaaaaacgttgactccgaagggtccaactgcgaccctttggtgtcattggtgatgtccctcatcgttaagtcagcaccgtcttttccaaacttccactccgtaacaatcttccccgtttcaatgtcgagctggtgaagcttcgaagcgtggggctttccgtcgtttaaaggactcatcagcatcatgttcgtttccgcacgcatcaacaaagccttgttcggcgtggagccaccgtcggcgaacttcacggcgatgcccttgccgtggatcccgcggtcgaagttgcggtacacgtggacgccggcgtcgttcaccatgaaactattatccaacgcgcctagggttagggtttggaccccaccgttcgcggcctcttcgaattcctccattaggtcgtttctccgcctcgacggcgacggcgaaggcgacagctcttccgcaacggcgtcctcccagacggaatcgtcagcggcttccggcttcacccagccgatgaactctttaccgtagattttgaccttgttttcttccgtgcattcgattccgtacacgttctcgaagacgcagttttgaaattcggtgacgaatcgacggtaggtgtcgtcggaagggaatttgagggcccagacgccgtcggcaacgaaatcgacgcggcgctggtcgccgaacatcttcaattgcatttcggaggaaaccctagcgcggaccttggaacctacagtaaggaaccaaacggcgtcgttttcgacgtctgagtctttgagaaaggcgtaggaggttcgtttgtcggagaggatccacttagcgttgggagtgttgccgccgatgtggaggtagagcttaacagcgttttggggaagtgattttgcggaggaggaagacggcgtttgatatttgagttttaaggttttgagtttcgcatccacgtcatcgagctcggtggagtgggttttcgcgtcttcgtagtgctctgtttcttctttttcttcattttcttcttcttcgtgttcgtagtcggagtctgagtcggtgacttcgaggccctcgcggctctgagaagtgcccatggaaaatggattttttgaattgaaggattttgattttcgaattcaatttggtggggattgggttgagattaacggttttatagggtccctaccggttagtcagcgtagatttaacgcactttagttttattttttttaaatgaaaaaagtaatgaattatttaaagaataactttatatcggagctaagaggcgccaagctttttgtgttgaggttgagtgtctttgcttgggagctaagcaaggagccaagagtttgtttcgataattgtatttggattgatggcttttcagtattgggttcgcgtttgggccgtgtgatatgctccgctacgggtagcattggtgtttgcttactggcctgagtcttaattgaacggacaccaacatgaaaggacattcagcaaggaaaatgttggatgatgatggtaaggtaataagtttttattattaaaagctgtgattaatttcttgttaatggtatgtatgttttggacttggaaggccatttttgactgaagtggtctatcaattttgaagttcaaagactaaatattaaatgatatcaatgaatgataatgactattaaatacattcttgataatagaatgtttatatatatcacatgtgtatggttccggagctcatatctttcatttttctcctgatacaccatctatagataaagagagtgagagtttggaagaatcaaaacaaagcagttttttcatgacaatgactggaggtatattttgattttgtttttcgcatttgttaatgacttgtgtttcattttgttgtttgtaacatcacaggtttgttattttagtcttacatgtaagacatgattgaagtgatgggtggagtacatagattcttctaagaagacatattatttcttaaatgcaatgaagagtgtgtttgtattgtggataccaattttctttgtgtcaacctcttctttttttaagaaacattatctttctttcttgctttttatgtttaagttgtctcgtattttgtaatgtagcgaaattattggagttccaaacacacatgaaattgtttttatatgcatgttcatgtagggcttgttagataggatgggattatttttggacatctcaaaattgatctgcaatgtggttcaagatgtattaattagtttaagggtttgctcatttgagtgaaaaaggagtaaataaatgaacactaaaatgatatggagctcacacttttatcatatactttaatttaaaattttcatctcaactcatttttattctatttcttttaattctatcgaacggaccctaagatgcaattttttgtgtgtgtgtaaaatgcactaatttaatgtatagttcgagatgtacaatcttatattcatttaaaatattggaggtcttcaataaatgtaggtaagattgtaatgtccctatgatttaagttttctgggagtcatttcaaaacatgatgctacctaatatgaaaacaaaactatatgaaatctaaatcacaataaacattaaacataatttaagaaatttgaatggtagaagcataagtatattatctagctcatcaatcatagtaactttttgagacaatctagcaaaggttcaatagcattccatatgtcaatagacattatgctagtaggacatgtgtatcaaaattttttctttaaaataggtggtgtgattgatgagttaaaagaagtttctctttgtcatgactctatggagtatttagaagagacattgaaaagttatggtaggttaacaaggaactatattaaaaggtgcttatgaaaagttatgagtggttagccattaaaggtcacatgtcttatatcagtaggaaagatcaaggtataatgtatgttgtcttggcagcctcaccagtactctgatggaccactaaaacatgtggtctaaaatggattttacttgctatcaaggattgtttttcagtttattttattttatttatataaaaagacaatgactttcttatcctttattaaaaattgaaaacctaaatcaaggttgtcaccggccgttagaaagggtaacactccgtcgttggattccgaccactacacatggcaacgatccttcttcccctcctctctcatatcttaagttctctagcattccctcaaagcttcccgtttgtcctttatcattagtggtggctgccacccatggctgaacaacggtggtgcaccactcctcatcacaccgtcatggtgatacgctgcgatggctacgccattgcttgtttcgctttcaccgttgtgtaaatctctttgctttcctcatccacccgctccacctaatctccaagtcttcctcctttgttgaataacttttgtttcctcttttatagacaggttcaacaaaatgccctttcacttcccttgagcgaatcttgtgttaacactctcgcaattacttcacaatcaattgacgctaccactattcaacaacatcatttacgagaaatcacatataaacatatttttaggtaatgtaatgcaattaattaattaattgatacgtaataattaaaaatattttaattgctaaaatgagtaatgtaaagggcaaatgagtaaattaatatgtctcaataaaattttaatatttaataatattgcaaaaaactggtataaaagatcacgggtcacacgtgttaatcgtacgtggttcaaaatggaccatatttttcaccggtccaatcttccttactttaaagtaaacttttgagttagactgcaaggttatggttaagagatctcgtcgtcattcttgatgaatgcaaggatttgctttctttaaatacaaaatttaagcttcactacataaaataaaataaaaaaactttaaactccagtttattaagatataagtcaatataaatgctcacgttttagcaagaacatattgctatggaaacttctactgtttgaataattttaataaattatttgttattgtttattttttatatttattacaatgtttatcttaaaaatatgtaatatgacccttttatgttatttttttttactcaagttaattttcttaattttatggaaatttattacttaatgtgtaatataaaaatatagaattaattaataattatcagtttaatcatggctcaattacatttgaacttataaatcataaattaatattttattggttcagtatgatttttaaaacatggtttttaccaaagtaatattttttcacgtgtcttaatatttcataatgtcacaatataattccatgcgtgtcttaatatttgtctctcaagtctcaacttgtaacttaatttatttgtttaaataaatatttttgtcattttacccattgtacaatccaaaatatttatgttaattattaattagaagagggtactctactaagtttaactcaaataacaaaaacagagtgagattttgaatttttaacggagatttaattggtctcttgtataaatgtaaaaaagacacattttttgttctttttccatgtttacgtttggcaggatgtcccgagaggactgctaaaaaagacacaaactcttaggatttaatcaccaaaaaaattataacaaatatttcgatcttgaactttcatcgtctgaacagaaatacaagagaagcatgtcaaggacgactcacttatattaacagaattttttatttgtacaatgacaaacatagataatataagttagcaaaataatattataaaaatattatattccaagaataattaatactataactctattcaacgaaagaaactatttgcctgttaataccaactaacgccaatgtcgtttaataaattacagagtggatggacatatgaccaagtcaagccatgactattactatctttcaggagagccttggacgtgtcaacccttgtgaatgtggaaccaggccatgccatgatctctttctcttccgttttcaacaaaacaatcaaaaaaagcttcccaaatcgcatgctctcaggtggggcagtggcttatgacagtatgagcccctccgtcttcctcctgtggcttatcactatttctgtcctcgcccactctgccctagcttcaatccctctaggtacaaattatattgatactcaaattaagcaccctaataagataatgaatttgcattcactatgtacatatattaatgtgctaaggttttttctttctttcgatgcttgcatctaatatgtacacaatttaatacctctttcaagtttattttattgcacacataaatgcatgaggaaaataaccatagacatcaaatactatttaacatttattagagagggaaagtgagaggagaaaaaagtttagacacgacaaatgatatgatctgatatgataatcagaagaaaaaaaatgttgatgaaatattgatgtctgtatatcatcactcaatgcatgatatataaatcattcaaggcttcaaaattacaacatggtcatggttttgtgatttttaatattgacaaaatttaaaggcggatgcaattacgattgtgactgtgttacggccacataaattccataaacctttgacattacaaccgaaatcggccgttaactattttttaagcccttacccataaatgcataaaaaatttgtaacatgaagattatatatatattaatgtataatggtgacaatgaaagttcgaagcgatgtcttcatgcatgctctaccctaaccatggagaatttatgcatacagggtattttttagactgtgggggcaccaaagaggtaacaatagacaataatctcacatacattcctgatggaagctacatcaaggtgggcaaaaccaccaccatcagcaagccagacttgttgccgatactctccacattgcgttactttcccgacatgtcggctaaaaaatattgctactcattgcctgtcatcaaaggaagcaaataccttgtgaagacaatgtactactatggaggttttgatggaaggaataagcagcctccggtttttgatcaaatcgttgaagggacaagatggagcgttgtgaacaccacagaggactatgccaaaggtcttagttcttactatgatattgttgtagtgccatcggggaagattttaagcgtgtgcttggcaaggaatgcacacacgggtggtgcaagccccttcatttcggccttggaggtgaagatgttggatacttctttttataatcctattgactttaacaaatatgcccttctaaccgttgccaggaattcctttggaggtgaagatatcattaggtaactcaatgtttcagctttttattttctctttagagtattggttttaattaattttagaacatgtggtaaaataatttaattttatatatatggggtatagggaatgtaactcttgttatcataagaagtaataacaataaatataaattagtatatgatatttaaacagtcaaggaccaaaaacaggtggtttgaataataagaaaaaaatgttttgaatcatgaaaaaatattatttaaagtgttttaaagataaaaaataaaataaatacattttaaaataactaaaacaaaaaaaaattacaaagagaaaaaatattaattataggaataaaaaaatatttaagccataaaatatttttactctgtaaatctatattctacgtattctctatgtgtttacataaatagtataaaaaatgcagaattaaataggtatggtgagagttctgatctaagatgtttatttgtggacctagttttccagatgacaaattcaacaggatatggcaaccatacaaggaccagaatcctgttgtggaaagcaattcaaatgtcacttcttcagacttctggaatcaacctccagtgaaagcattcagttctgcaattacaacaagtagggggaagacacttgagattcagtggccttctatgtcccttcccagcacctactactacatttccctctattttcaggacaacagacatccaagcccttacagctggagagtttttaacgtttctattaatggccacaccttcttttccagcctcaatgccacaactaatggtgtcactgtttatgctacaaaatggccactctcagggcagaccaaaattacattgacccctggtagtggaatacctgttggaccactgatcaatgccggggaaatttatcaagttctacctcttggtggtcgaactcatactagagatggtaacttactaatctcattattttccaatgtctttgactcaggtcatgttttaataaagtttgttataagcattttgagaagaaaataaaaagataaaatgaattgaattgaattttacctaagttaaaatcaatttacttgcttaacttttgtagaaattctttctgtctaacttctccaaactctaaaatgcataaattagattttcatttataagagaagttcaatttttatttatttattttcttcttctataaataattaattatggagaaatttatgcaaacataacctatattacaatcatgaagctagttgttgaataatatagttgttgtggttatccttagtaattgcaatggaagatttggcaagaagcattcagaatccacctgttgattggcatggtgatccttgcctacctaagggaaattcttggacaggggttacatgctctaatggtttccatgcacgagtcacgacactgtaagttcactaataggctacaaatataataattaaattccactgaaatcttcttaatttatactgttcattggacttaattcataagtaaatgagagtggaacaatgcatctagtaacagttgtcatcttgtgcctttcatatgtttaatggtggattcacatgttttgttttttttgtaaatgtgaaggaatttgacaaatgccgggttgtcagggtcacttcctccaactcttggccatctaagtgcactagagcatctgtatggaatgtttcccttttacttcaaatattttccaacccaagtgatttttttttttccctaacaactgaatcatgtcactttttgaatatttgcttataggtggcttggggaaaacaaactctcaggcaaaatccctgatttgagtggactgaaggagttagaaactttgtatgtgacccaaaaagatgcattactattaggtcttgtttggaagtaaatttttttagaaatatttatatgagaagaaaaataaaaataaaaaatatgaaatgagtttcatttcagagtaaattaattaaaattaatttttcattagttaatttatcaaaattctctcatataatttctttaaaagataaaaagatatttacaaattagttaataaatagttaattttaacttatgaaaaattttatttttttattttattttcttctcctaaaaatgtttttataaaaatttatctaaacagatacttaatttctgaggtttcttaattaattgtcctatgtaattaacttgatctttaactcccttttttctttgttaaatctaaggcatttggagaagaacaactttgaaggaacacttcctccgtcaataaagaaactccccaaactgcgtgatttgtaagattttaacatttcagaacaaaaccgctaaaatgtttttcttctttctctctatgatgccttagctaacttgtgtgtgctctgtgacaaatggtgactgtaaaaccagtgattcagattttgagaataagtcaccaaactaatcaaagcgaagagacgcgaaagtagtacaagtaagcgcaacaccaacttttgtatctatgctaattataactaacattaatagagctcctctgaagttcagaaattgctaactataattgtgtgttttcggtttcgaggtggctctagagattcatcagtgataaagagcacaaagccattgcaaatttggcaggttttgtatgtgactggagaggctttaatacaatcacagtgtctgatagaatgagaagtaattaattggcaccttataccaatcccattatttctttatcgccttggaattatgactgtatgcttttgctgcaaatattagacgcatatgtgtatttacaccatgatatattgagtaaatatgtgatagaatatgattgaaagaattaatctattgttaatgaagtggacccttacacttagccatggctgcttatatagctcttaacttccttttgcactcccctattcatcaaataacttttgaaatggtagagacatttcttatgtttactctattttgggtaagtttctttaaaaatatttttaaaagaagaaaagaataagatgaattttttcataaataaaaataagttcttcactagtgaagtttactaatattgtttctcaaaaaaatgaaattacatctacaaatgagttaataaaaaatttattttaatttatagagaaactcatttcattttttcttcttactttatttttataaaagtacttatagagaaactaacatccaaatagttcctcaatctttttcttatgttgttttactttggtgatgaggtagcaatcacgagttttacttttacattctagtagttaccacaagttcacaaagaaacattgcgagaatcttttgttttcccctatgctaaaaggtcaattttattttaatcttgaaattaaagaaaattgtttatcaaattttgtagtgtttcatgtaagtacttaattttattttattttatcctaaacttatgttattattatcatcaattaaggctccagactaggaataaaaataaaaataaaattttttaaaaaattatttgagttttttttttttaatttggagaacnnnnnnnnnnatatcacaaataaatatttttttagttgacataaaaattgaaattaatttataaaaatacaacggagcatgacggaggtagcggagcgacccgtgcgtctggacgggtccaaaaactagtaacttttgaaatcctagagacgttgtttcttatgtttcctttattttgtgtaagtttctttaaaagtatttttaaaagaagaaaaaaataagatgaattttttcataagcaaaaataaacttttcattaactgatatttagaagttcaccaatataatttctctaaaagatgaaattacatctacaaataagttaatgaaaaactcattttagcttatgaaaaaatttatttcattttttttcttactttattcttctaaaactagttcgagaaaaactaacatcctaaatcttctttttgtgttgttttactttggtgatgactgatgaggtagtaatcacgagtttgacttttacattctagtagttatcacaagttgaaaatgaaacattgcgagaatcttttgttttctcccatggtaaaaggccaacctgattttagtcttgaaattaaagaaaattcaaataagtttatgaaattttgtagtgatcatgtaagtactttattttattttattttatcctaaacttatgttattattatcatcaattaagctccagactaggaataaaaataaaaatattttaaaaaatttatttgagtttttttttaatttggagaactaaaatgacaacaaatacaaatttaaagaataaattaatttacatgttatactttagataaatcagatatttctaattatataattttataccagtaattaatttgaatttatttataaaatattaaatacttttaaaatttaataaaaattataaacttatccatttaataaaaaattataaacttatcaaaagtaacacgttgtaattctattattttcacatttccgatattttattttctcattataaatgtctgttgttttccatgttgacgtttaactcaactaaacgtacggcatgataataacagagactcgaaaatcaccaaattccattctatattacgcatacaaattaaatatataataataataattcccctcaaatttatgcacatttccccagaaaaataagaactccaatcttgtcctttgggttcatttttttctgcgaatgttcgctaccaatgccgcgagcaacctcttcttcccctgcagcccttcgtccttccggtgcctcgccgccgccggagacctctccgcggccccctccttcctccagtccgtcgccggcggtctaagaattggccagttccccgacggcgcaggactcgccgtggaaggacggcgcggcggcggcggaaacgaaccaataagggtgaagaaatggtctcggaagaatgagagctacttggataacgacgccgagcctcttccccttccaatgacatatcccgattcctcgcccgtttcgcaagaagagattgataagcgcctccaatgcgatccccaaattcaggttttagcctcttttgattacttgtttgcatagtgaggtagttgtatttgagtaatttaactagttcacatgatacgtttttttccctctttctatttttgaaatgtggggcttgtattgtaggattgtaaagaggtggtgtatgaatggactgggaagtgccgcagttgccatggatcgggatatgtgagctactatggcaagagagggaaaccggttacctgcaaatgcattccttgcatgggaattggtaatgcattttgtgangggggggggggggggggtaaggggttaatcatgagatttgtaaatcttttatttatttttatttttatgaacatgttttgagtgtcattttatgacctttaaatatcgtagctacataaatgtgtttttgcccatacgcttgcgaacatatgtattatatatgtgacactaacttatttagaggatgagtgttctcctgtaggttcattttgtcatgacaacgacctattttgagaattttctcgttattcttttgtttgttttttagaaagtggatcaattaactctcccaactacacacaatgactggaactttgtgcagtgggccactcttttagtgagacaaggtttggttgttgttgtttagtgtttagctgaaaatgtgtgtttgcagaggagcagggggaggattgtagtgaaatttggctttgccttatgtgctatttgggttcaatttttttatttttttgtgaaatgtttaggttaggcatatctaatttaaccccttctagagggctaactgctattcttttagcaagacaccagagaaaaaaaataactgtttctgaactgttaagcattcttgatgtttttaaagaaaaaccctttatctccttgtaattgttgaagatttaacatcaactaatgatatgatcaaattaacgtatataagtgggggacaacctccaccttaaaaatggttttgtaggtttaagttaggccaaacccaaaattttaggatagtatcagagcctatcgcttgttgttgggcctatcagggcagttgttattcggctgttatcagaccacttgtagatgttcagtcctacaaattttacactttttgagatgtccagtcttcagtgtaaagggtgtgtgttggagattccacatcgactagtcatatggtcaaattaaacttgtatataagtggggagcaacccttaccttaaagcccattttgtggggttgatttaggtccaaacccaaattataagagtaataatctctgtgtctcctattttcgttagcacctttactatattgttgaattctaaataagctaactttttggctcctaagtttgctcaattagcttcctacttcatgaataattttaatttttatgcatcaactttggttcttgtaatcacaattactttctcctttgtctgcaatatattatctctttttcccctttggcctttggtaaaagatagcagcactattgcacttgcactcatatggaaatttacttttaatgttgaaactgtcaatgcattgtttatactttatgtgtgtaatatatatttagcgattcaacaaatatataattagataattttgtcttataatgtatatatcattttattttcaggcatatttgtttgtatataaaatattgagttgtgatcaaaagctgtttaggtgtaattatgtgatgttataatcatcctattagagcaaatatgattgataattgtagctatcatatggtcacaaatctatttgcttgattatcattcagtcgcgattcattaacttcaatttttttctatttgtaaaggtcttgtttttgcattattaattgttgagtggcatgactttttggtaaatttagttttctaccatcttaacagtttcagcatagaagagggtagaagagtgatagctaaaacttgagaaaactactggctgattgggttttccccgaggatctctaacagttcttgtgttttaatttagaagatttggcaccagcagagatgctacaaggctttgacattgctcaattggcaattatctggagtatctagttggaaagaaatgctagaacctctattggatgttagttacctcaagtttatttgggatccaatcagttaacctagtttctttttagtgttctactactggtattctttgggggcagggttgtctttatagaatagagagattgacttgttgtatttacatgtttcttgttcttagttctttttctaacctcttatttttgtcataattgttgaagatttcttttcctttcacatttgtacctctcttttctcttttaataaattctagtatataattttttttacatgatataattttatctctcaagtatgtatctgaaatataattccagtgaactgtgaacatgctaaattagcccacatgntgtacctctcttttctcttttaataaattcttttatataaaaaatcatttacatgatataattttatctctcaagtgaactgtgaacatgctaaattagcccacatgtagcatagacagactgttttgctttttctgttttttgtttttgtttttttcattcaaggcacctttatttaatatattgcatggctatagccatgccccattcatgtcatctgatttgtgacttcgggcaaagttagtctgtccataactatcaatagatccttgataacactcataacagtgcagagctgctgaccccaaaagtactgtatcagaatgagtgttatactgaaaataatggaaaaagtatgcaatttatactttacacatacaagtgctaaaaaatcaaaggttacccaaaattaagaacatattatcattaataatcaaaaatcgtttcctacagacacaatcactgttaatcgaaggcataattaacaagccaataataacaaggagagaatgaggctgaggtgctgtgtttggttgttgtaaatttgtaattgagatgatggcttgttaaccatagcaaccatgatggttgcaacttgtttgctatttgcccacaattcaggctgctatcatctcttgataataatggaatgcaatgtcacttctggtgcatcattcaggccatgtgacatgatgctaaattgctatgttgcactattaactataatttttccattttatagatttgaagtcttagattatattagaaagtttgctattcctcgaagttagccattctaatgtagaacgtttccacttaatttccattgagctttttcccaacttctctgtatggccaaaaaaatattgcttgataatggggaggatgtttctctttgttactttgagttgttatgcaatatgaattaggattcctgtcccattgtcatgaattacagcatataatttgatgacttccaacataagagtttcgtagattttgttccacccatcttcacaaagaaagatttcaagggataccttaaaatagtgcccttgcttttctagtttccttttgcctgtagttagcttgaatcataaattcctttatcatatactgttaatttcagtgttgtattttttttaatgcttcaaaagtgtttgtatatcctacatggcatagttactgaattataccaagtgaatacttatgtacaggcttctgctgtttaggatgttccctgttcccttttggtttataatatggtgaaacgtgtgatttgagtggttgatgatagaggctttgttgcatactgaagttgtattttagctaggaatttaatgtgtggattgtatccctcccttccatgtagtgggtatacctttcttgtaacgttacattcataggttccttgtactattgaatatataccgcattagctattataacaatacaaagcaatagatttgtcttgcctcggggccatcttagaatttcttttatataagtgggttatcccctgttttaagtgtttttttttccttagatgtaaactttctgctttagtactaaaccttttcctaatagtgacacacggacttaatggacatgcatgacgtttctatcaaaaacattcctgagtgaccttaattccatgtcaactttctgaaattccctatgttctttttatcttcacttttgtccactgttatttcaataatgtcaagttttagtaatttgcctagtgtctgttttgcaggttacgtgcagaagataacagctcgcaaggatattgatgtgatggaggatttggagaatggaaaaccaccatgatggttgatggtcctctcggaccccctcagtcttagattcttgttttatttcatttcaacacgtagagaatttgtactttatttatcttgatgagttatatatatatatatattcttccataaatacttcctcaaaatattacgtaaaggaacattgttacgattagatttggtaaagattatatccactagaatactgacttgattaaaaaaattcccgcaaaggaagataggaaaacacaattgtatcttttggaaagaatatattcttttccataaattatgcttatcttttggtacacaccattcttttcataccctgcattttcgtttagcatcttaagtttcgtactgatgaggggcatgtcactacctcttcaatttctcgctaatataaaaggccatatcatgttttcatgtcaaatgaaatccatcgcagcataaaatgtcaaatacaagtttccttaatttccaatacaacctctcaaggaaaaaatacctgaggaagccatcgcgtctgttctcccgggaccggcagaactccgggctgaagagtgtatatcttcagcctaaggctgatgagatgaagcaagtgtttgacaaatttgattccaataaagatgggaaaatttctcaacaggagtacaaagccaccatgaaggctctaggcatgggggactcggttcatgaagtgccaaatattttcagggtggttgatttggatggagatggattcatcaatttcaaggaatttatggaagctcaaagcaagggtggtggggttaggacgatggatatacagagcgcatttcggacatttgataggaatggcgacggtagaataagtgctgaagaagttaaagaaatgctgggaaggttgggagaaaggtgcagcattgaggacagtcggcgaatggtgagagctgtggacactgatggagatggtatggttgacatggacgagttcacaaccatgatgacgcagtccctgaagcatgtttgaatgtttatgactatcatgtttattgagattgtatttagggtcacctcaatgaaagttatgtgtgttgtatttagatttgtgcatgtttttaataaactggattttgaaatcagtagaacaatacaactgtactgttaaaacgggcaactctattgctagtaatgaataataatactaataataaaaaactttcttgtgcttcaatttttatctcattacttaaaatttgtcgagaatcacgttcgaggagccaagccttagtatctgtttggtaagtgtgatttaagatgacgggcgcagacaaaaataggttttcatgtttgctgaatgtgatttagaacagagttaaagttgaaatcagtgggactcatgtttttcaccttttatttcaactttatttctcttttttcaaattatttatcttttattttcatatatcttttttttttctcctcacaaccacacaaagcattaatcctttgctagaaaagatgaatttgagattatcaatgtaaagaagcaaacacatcttttttggacaaattgtcctcgattccgtccattctttatactggtactaatataccattgatatattagttttatttatctttctctctcttaaaaaaaagagagaagataatttcatatatcaaacaaattcaaatattttttgtggaggactatggttaggaaaaagattacttgagtaaattacgataacttttgccaatcaaagaaaaaagatcgcctagggcatgtttgtatctatgtttagtccaactgaacgccaattcaaggccccgccttccttctctgtttttatataggaaagtaagaaacttcagtttaacatggttgaaacggtttttcaaacacactcgtgttagatatttatagaagtttacttttccttctctgttcttacataggtaagtgggaaagttttgttcaacgtggttgaaacggtttttcaaacacattcttaggtgttggagatttataaaagtttttttattcataggaactaaatttaagtataaaaaatttacattatcttacacatactgtttaactaactaaataagacacccttgatacagaagttcaatttgaccctgctagtgaaatggaaatggagaatgttagttgagaaagtccctttggaacctgctcttgatagcaaaatatgggaaatagaatctagggaaagagggagatattttcagaaagggcctacatggtagagaggtctaaggaagctagaagagagtgatgcaagactggcaaattggttataaaagacagttggtataaaattaggaaatgggagtggtatagctttctagcataaaacttcggcaaaaatgggagcttttaataagtctttcagtagactattccaaatttcagcatgtaaggaggaaatagtaaatggtatgagaacatggacaaatagagtttgggagtgtcaatttcattggtgaagaggattatttgaatgggaaaaggattagaaaataagttttttaacatcatcagtagggttggagaacattcaaatgagtgaattgcattcgaaggcatattattcatcaagaaaatacattgtcaagtcatcatacaatctgctccaacaaattggagtacatgtcgataagaagctttttaacagtttatgaacctcctttgctcctcagaaaattgcagctttcggttggggggtaatactttaaattcccacaaaacgcaatttacaaagaagcggaatagtgtttaaaagtgatctactattgggacacaaaaaaagtgatattcctactaaacaagtttaaaatgaagtcaaggtaataattaacaataaaaacgggaaaattataaaaacacctgaaaatcatgacttgatattgaattcgtcgattctctgcatacacatgacctagattctagtaagtttatatttcatgctctccaccacgtggaaaaatctgaattgccatttattttttgcccgaataaaataagttcagtagcgctatcacgtaatgcaatcagcaaccagtggcagctgttttaatagcataccagttgcagtagagtacaattccaaatcagtgctcactgctcagaatcacatacccatgtgcctaaaagaattttgccccccaaatacaccgtctttcagtatgaagattgaagatatccttgtaaacatcttttcaaaaccaaacttcaaacaatctaacttgttctacaaattttcatggatcaatcaatacaacaaagtgttatgttgctggaaccaaaaaaccaatatacaaaaaaccatgtaagagcaaattttaatgggatcacaggtaataaccctgagtagttgagagaataattaagtgaatatctgaacaagaagcaaatacattctaaatcattgcatactaaatatttcatctcctatcctagtagtattatagcttctccgcacattcgttttcccggtacaagggtatgcccggttgaaaatgatatgtccatgctataagatttcaagtaatgattctttcaccagtaatccccacaagagcattttccatccttgaaatgatgaaaccttttgttatctctgacaatcaattccctccctacaatcctggacatgatcttgatggcattgtgacagtcaccacagactcgaaggttcttgatgattctaagaggtgttcttgggggagtactaataagaccataggcaattgctagacgttcactgtggtaaagcaaggcttgctcttttgcttcctgatcaatgtcatgaagaacatatcttgtgtcaggaacataccctgcttctttcatcccactcaaggccttcaacttttcatcatccttgtaaagagtaggattcttatattcaataattctgttcctgccatcaagcatgtttattgcagtatacttcttcggaggtggcgtggggatcttattggcaacagcttttgatgggtcaagactaacaatcaactcttcagtatagtcttcaagatcaacatctccatgaacgcgagcataatgcttcagtttctcccatactgctaccgtgggctcgaatggcaactggtcaataaactcctcagcttccttgaggtatgcagattgtccaagaacatccaaaagccccatgtagtgctccaccccaggctcaattccatacttgcttttcatagactcaaaatgtaggaaagcatcctccacatcctctgcactggcacaagccaacaacaccgcaagcaaagtctctgaagtgatctccaacccaagctcattcatctggtcaaacaaccgcaaggcatcgtccccattggtgttattagcatagccccgcaacatcaaatgccaagagtccatatccctgttgggcatatgatcgaacaccctgcgtgcatcagtcatgcttttacaattcccatacatttcaatcactttgttgttcagtgtgagatcactcctaaaagtggattgtagaaagtggtcatgggccttcttagcatcctcaagggacttagattgcccacacaagtcaaacagaaggtcaaagcaaccagcatcagctttgaccccattgtccatcaattcaattgcctctttaagtttcccctctttgcacaaacgtgtcaaatcagtaattgaaggaggtagtggaggaggaggaggaggagcagggtgggtttgcgcttgaatagaagcttgattgttgttcaactgattattagggttttggaactggttagggtttgggaacccctgagacctagggttccattggttgggggcagcggggttttgattgttccatcgatttggggtagtgggtgggcgaaagtttggatttggagaagtgggtgtttgaaaatagtgattttgaggtggtggggattgagggttccactgattattatggtttccaccatgttctggaaaaggacgaggaacattgtgttgacgaggttggtggttatggtgatgaggaaattgattggaagggggaggagggttggggtggtgatgggtctgtgggttgaaatgttgaggttgttgatgttgatgttgttgctgccattgttgttgaccttgaaagtgtgagggatcagagggtggttggtgttggttttgttgggaagggaatctttgatactcgtgtgggagtgcagaggtggatagagattttgtagtgagggtttgggtgaagtggttgccatggagaaggtgtgttcgaagcttgaaggaggaagagagcatagtggttcgcgcacgctgaatcgatgtgaacgtcgccattactgagtgaaacagtggcagaaggaagcaactagggtctagggagacacttctgtatttttattcgaaggaggacgacaagtgattgattgggttccttgttttgtttttgggtcatgggctcttattttgggtcacgataatgagtgtttcttcctgcaacctttcgttatttctaatacaccattcataaatagtgcatttttaaaattgtcctttgctttttataaaggatccgtataattcatgcttacggattacgaatatattttagaaaataatggtgcaagcaggtatcgaacttgtaacctttaaattattaatatgatgctctaaccaactgagctaatagaccaattatgttaaaaattaattgatattgatatatatatatcactaaatttatttaatttaaaataatttattatgttagaaatatattgtattaaatataaattgaaaaatttagtgttatatgtaaaatttaatatatatttttttaatatgtttttttatttttatactttttgtaaatttcacttttaattcttaaacattttttaatgttttttatccttatttttgaagctaacaatttatttcatatcattaaataatttcatagatatgtaaattataatataaattttacatataatttacagatatgtctgcatgcattaattcaacatgtaattttaacatataatgttattataaaatttaacataataaattaaactataaattaatagctcaattacattaaaaaataattaatgttgctaatataacactaaaattttcaatgtatatttaatacaatattttttaacataataaattattttaaattaaataaatttagtgatatatatatatatatatcaatatcaattaatttttgacataattaatctattagctcagttggttagagcatcatattaataacttaaaggtcacaagttcgatatctgcttgcatcattattttctaaaatatattttaacttttcaaaaaaaaaaaaaacaaacggattgggcttacggattgcccaatccgtatataaaaaaaacaatcggattgggcttacggattgcccaatccgtacatgcaaaaaaaaaaaacttacggattgacgaatccgtaagcatgaattatacggatcctttataaaagctgcaaaaaagcgaaggacaattttggaaatacactgtttatgaatggtgtattagaaataacgaatggtgcaggaagaaacactccacgataattcatcattacatgttttagggttatacttccttcacctcatatatttccaatacacccagtattgtatagttaatttccaaaaatacccttttataaaaagagatacaccattcagtatgaatcatatggattgtcgatccgtataactcttatggattaccaatccgtatgagtcatattgatcgacaatccatatgatcaattcgtatgagtcatatggattgacaatccatatgtctcatacggattaccaatttgtgtgagtcatatgaattttcaattcatataattcacatagattgataattcgtaagaggtaaagttgaaaataaaaaatatgttagctgtaggaagcataatcccatattttatttaatttaatgctcttatgtattggttttcttttaggataaaaataagacagataaaaaaatatttctattcatttttttggtaaatttaggacatccttgacctaaagcccctattttatgcataaatttggtagaatataagttactcaattccactcagttgaactaatcaacagtctctagacatcgggagtttctcttgataggactacccaccaagtcaatgagtaaagaaaatgataagattttaagcacttgtattcaaggttgtcaaactcgcgattttacgtaaactcgtaagaatttactcaatataaaaaaatatattagtattcctatatataaaaatcataactaaatattttaaccctaaaataaatcaaaatcacaaactttaacaataattcaataaactaacatagtcaacacccaatcaaacataaattcatacaatactaaagataagttcttaaaacaaaagcatttaaaaaacagaaatagttcaaatgttcatcaatcatctaattaagtcatttccaatatcaccaccactaccatcatcttcatcttcatcatcttcaagttctttttcgattgagaagtaatcttcaatattgtcattcaaaaccaaattgtcaatatcaaatgcatctaaagttggatcacttaaatttcctcaaaccaagtcaatattgcttccactatcactttcacctagatgttgctcaacttgaacattgtcttcataaaaaatatcatctttctcttttattatccactcatcatcatatttcatatcttcaaatggaagagtaacaatttttcatatttgtctacttttcagattcaagttgtatatcacataaactaagtcattcatcttcttttgatgcaagcggtttatcctctttgtatgaatctataaataacaaaaaaattgaagttcataacttaactaaagtctagagtaaatcgtatgattctacctagtttagtctgattctaccaagtttggtcagattttactcaatccgatccgattctactgagtttactccgaatctatcagaaaacgattctatgtgcgattcaactcgttgggggagtgtagactcgtaaaatcgtacgattttacgatttaaaactagagtttgataactgtgcttgtattaattcacattggcttttggattaaacttgtatatgattaaatacatctttttttttacataaagataaaatcttaagatatattggtgtaaacatgattatttatcacttcttaagaatacaaaatttaaacttagttcttgtatatagtccaatcttgaactaaacttacatttatttatttaataagccaaataaacattaattaaatttaaataaattacaaataatcaacttatttatatagttaatcttgtgtataatctaagtttgtacatattaatattatatttgaatacgatgcggttgatagagctttactcttcacatgataggctataaaccgataagaatgacacacacaaaacataacaataaaaacttgtttgttttgttagaaatgttagtttagagattcaaatttgtaacctcttctccctccattcttcctttagccttcctcaaccagtgaactaactttatatcttcttagcaattcaacttaacatcgtcctattgagtacgtccaatgcattgacctttgagggtaaaataatttctggattacgaacagactgataagactaaaaattgagattggaacttgaatggatgtctaagtaaaagataaagcctaataactgcggattagataattgtcatgacacaaatgttcatttctattgaataataaaaacactcaaaccaaatcctgataataaaaaaactgaaaccaagcatcaaacagattatataccccacaaggagttgaaattaacagcaccaattaaccaacagctcgagggtagtgaacaaaggctcctaaagaggtttcacttttcatcttgtcatagattgcgacattactggtgatactatagctccttgtctttgtctttccatgttggcttcccaacctatatttcaattaattacccaacaacaagtcagtttcatatacatttaaaggacaaaggaaatcagtgctcataaataatctgcaatcatcaaagtaaaaccacaaggtgaaattttatatgctccatttgtcaaccttttatatctgtagtttgatgcagttagtgcttctttttaaaatgatcataatctccaatagtaggtgtaaccgcaaaatgctaagttactgagtcttttttggttaaaatattgatggtccttaatatattccggttacaagaggcttaataaaagcaataaactactctattcaaagtaagaaaactcggaaagattaattctaatcaggggaaaaaaagtcaatctgacagaaaaaaagaacattaattttgcatccctccaatcagatttaatgaaagtatagtaccttaagtgtttttcatcttgttctcgaattaaaattggaggtgaaattttgtcccaatggaaattcatataatagatcaagcttattatagtagttatttctaaacagcatttaattataggacaaagattcaaaggcataataatgtctgacaattcattagattctcaccctcaatacttcaaaaacaaagttttggaaagatatatggaaatcagagaggtcctaaaattgatttatacatgtgtgtgtgtgtgtttcaatcataattcacaagttaaaaaggtattattacctatgctcaagtcaaatccacggtttttaagctctctatactcctgacatagagcacatgtttcacagcagaaatgaactaaacaatccatacatggagcctccggtaagtcatattgtgccctcagtttggacctataatagcaagaatacaagcatgaaagcccgctaagagccagtagcgtcccataaatagccccagcacaagtgcaagctgcataaatgaaacaaaaagaaaagaaaaattagcaacggatataaccttagtcataaatatattgtattcatatatgcaatgtttaataaaaattaaaaacttacttgtattgcctttatctattatctctgctatcaatccaaatgtaacacaggggcagaagcaagtgaccaaaccttagaaaataaacaaccgtagtatgtcaattgcttgatgcttatactattgagactaaaggataaaatataaatacaattctgtaggtgtttttagtgtttttttctctaatcagaattggagtttcatcttggtaatctgcaaaaattaatgtttgtactatttgagatgaaattcaaattctgattgaagaacaggaccaaagcacttgtagaactgtatctaagtttcatttgaagatgaattcacataattcatgggttcttacagtttccaggatcatcagtacaacggcacaaaccggttgaccatcgatgtgtcctgatcacaggaccccttacactaacattggtgctgatgtatggaggagcataggatggaatttgtggagtgccataatttggaggaaccacaactggtagaacataacctggatggctatgatgagctgcatatacctcatcatgttcatctactgcaggatacattttgctggtactttagcaaattggctcgaattaaattactgttactgtaatgagtaatgaccctctaaccatgacaaacttttctgcctatcttagtatatatataaatagatggaacttaatttaaagagggcactccacattttaattactagctagctggttaggcaatagtttttcagtctgattattttaataatcagaagtttcaaagtactagttagtaataagtatttgaatatcagcataaataattcgaatatgtccaacgaccattgatttaagagaaacaagtgtagattaagataggatcattacgttaccatgttccttctttaggatttaagaaggttgatgtttcctcgaaaatcctactgcaaaaggataggaaagaagacaattgtgaaaacattacattatacatgtcttgacttggacacggtcaaggaacatcccaatttcccatcatattaatttaaattcaaatgtgactccagaataatttattatttgcaatgatgctagctgaaaaataatgcaccaacgattacttggccagacaacgatagtcgtggtaaaataaataacaagtctatgtgaatcagtttcaagtaggaactttctcgcaaggataggatattatatgtcaatacaaacacgttatttaacaacctaaatcttatatcttcaacaactgaaggttgtaaatatacaatattttctgttcaacgcaataaaaattataatattttcaacgtgtagaagcaatcttctgtataaaaaaaaaatattcaaaagtataagcgactccactggggatcgaacccagaatctctggttccgtagaccagcgccttatccattgggccatggagtcgcaattttttggtgttgagagtgggatttgaacccacgccctttcggaccagaaccttaatctggcgccttagaccaactcggccatctcaacagaatgttatagtttgcacaaactttataattaattatttgtgactaaataataactttcgttatggcgtggcagtgtcagaggtactatcatatttattgaataatcttttggttatgcatgattttttatttctaccctctgaaatcttagctttcaattgcatttgcagtattcttgagataccattatacaacgcttatacgttcataggtttctacatcttctgccattcttgcatcccttgtccctatccttaagaaatatatagctcagtagtattaagcttggaatattttatatattaaatgcagttgtaatcatacagttagaaaaatatttttccgttataaaaaataataattttccttcctaggataacattttcctgtgtcacttccacatccaaagccacccattaccactcagttactttttttttttatatatagaaactctaagacatgatttttctccaaaaattgataaaattcagaaataaaagtttctttaagagatattgaatctatccaagtttcttccaagaattttgtaagttccttatttttcatttgcctagccatattttttgaaaaccattgaggagcaaatcttgattaattcgccttccactttgcataaatattgccactatactaaagaaaaattatcatccccccatcactcgtaaccaccctttttaattcaccacccaccatatgtgaatttgacaattttatatcaaattgcctaattatcatgaaaacaatgtcattcatttccactttgcaagcaacctaaggttaaacaaaaattgagtttgaaaagagtgagcgccatttttcttacctactccttcagtttttagatcataactatcaaagaaatattattaccattcattttatactttggctagtgcatacaccggtccggaacagtacatttccaaaaatatcctcatttttattacgcttcatacatacggattcgtaaatccataagattcttacggattcgcgaatccctaatttcttttttgagttatatgtccaatccgtaagtaagtttttttttaatttaaaaaatacttttccaaataatgatacatgtaggtttcgaacctgtgacctttaagttattaacctaacacttcaaccaactgagctagtaagtcaattatgctaaaagctaattaatgttgatacatataacattaaattttttaatgtatatttaatacacgtataagtttacgtaataaattatgtaacaattaattttgatctgataattaaagtattttttacgtataaaaatcatagttttaaataaaaatcataattttaataaaaaattgcaggtctaataaaaattatatttgtatttacaggttaaattaaaaattatatttgtatttacaggttaaattaaaaattatatatgtattagacctacaaatttttattaaacttataatttttatttaaatctatgatttttatatgtaaaaaatactttaatttttaataaactgtaaatacagatataatttttaatttaacctgtaaatacaaatataatttttattagacctgcaaatttttattaaaattatgatttttatatgtaaaaaatattttaatcatcagatcaaaattaattgttacaaaatttattatgtaaacttatacgtgtattaaatatacattaaaaaatttaatgttatatgtatcaacattaattggcttttagcataattgacttactagcttagttggttgaagcgtcaggttaataacttgaaggtcataggtttgaaacccacatgtatcattatttgaaaacccacatgtatcattatttgaaaaaatattttttaaattaaaaaaaaacttacttacggattgggccaatccgtatggcccatacggattggacagtccgtataactcaaaaaagaaattacgaattcgcgaatccgtatgtatgaagcgtaataaaagtgagggtatttttgaaaatgcactgttctgaaatggtgtataagtttttttctgaatgtataaagtttttccctttgagttggggtgattaagatggtttatacccatcaatttgatcttgttttcggccattgttaagctcactttggcccatataagtaaataaattaaatatcttggttcaatgttaccatctagtatccactatccaaagttccaaacccaacccaatgacttttatgactcaagaacctttttaacagtacaccaaagtttgtatagacacaaagtactggatcatgacaaaaattcattaataacaaatactgtgaatcaagggatttaacaacttagagacaccccccacacatcaacatcgtcacgcacaggataaccatcttggctcaataagaactttgtaagaacttattaagtaagccttaaaaaacttcatcatcttttgcatatactaacataaacgtcaaacttcttggaagtgatcacatcagagcttaacccgtggagatgattctagattctaccatgaatatttctaagcttgggctggtgatgaatagagcatatctttcttttttactttgttgcttagttatagcgtaatttaataacacatacttagtcatggacattcatgtgattatgttaagcaaggacgtgaggaaatttccctaaccatccactttaaagtcattgttggtaaccgaggttgattattcattgataattaagttggcaaaaagtcataaagatgagttaactaggttgttcattttctcggcaacctagtggaggctagctataaagtattcatcttttaaatgttgagattcacgaatgtctcgagaaaatgggactggattctcttcatattaagagtggaacttcaaacatnnnnnnnnnnnaaaaaaaaaaaaaaaaaaaaaagctccctcagtgatcaagaaaatgaggtagataaaattgagaaatgatagtcaattagatgaattgaacctgaagtacaattttttccatataattttctatcacaattaacgttgtttaatcgagttctagctaattaaggcactgtttatcattggttacagtttatgtcatgttatgtgtgatgatagattcaaaaccaatgctatcgaggtgtgtttgtgttcacattgtgttcataaaaaaaagtatgtcgtgctatgatatgctggtatcactttcttttatgtttatcaaacatgatctgagttggatatgttctgtttttgtcaggtaaatcatttttatatttccattgcctaagttgttttagactaaatcactaaactcataaattaagcaatggaaagcaattaaccacatttcacagaattaaacaaagtaaataaaagcttacaactcccttttgcaggacaatccaaagagaatactgtgttacgttttgagcaagattcatgcatgccatgctgccacacaaaaaataaattagagggtttctggatctgacatagtaaaatgagcctcgagcattgagtatttgtatatgatattggatattacattataataatatggactaaagcctcattgattggatgatactagaatagaaaaataaggactaaaagcatcatttattggattacaagagacaagttttgttaacaaaataggggaccaaaagggggacaagctcttaggcctaacttttcttccagcaacctagctatatgtggtgaatttcattaatcttgtgctaagtactaacaacaatctacggtgtgggatgagaccatttgtcctaagttcaattgccaagcaattaatatattaaactctattagtctccacaatgagggtggggatttcatgtgaaggacactcttggaaaagaaacacgtgaaggtcaatagttcaactgaaagattcttggccgcatgaatgaattattagtcttggcattacttaatttgcatgtatactttgtttccttcttgtgcttacaactagcttttccaatatttgacaaaagaagagaagaatataatacagacatgctacttgtgctaagtaatctgacttgagtcacatgcatggatatcaaatactgagcatctactacttgcttacttattttagtccaatcaaatataaagacgaagagatttataacacttacacgtcttactcaagtaactgaaataaatttcattcgtaatattttgtctatgtaaacattgtcttgttgtggtctacgtatatatatgtaaatgttttgttttgtatgtaccgtaaagattgttgatttttttaaaattatgtttaaattattataaaagaaattttgttaatatatgattggtgaaaaattcttgaacgaaattttgacatgggattcatcagcttgatcgataagtactcgtccattctccatcaagtgcataaattaagtcataatggtacattccattttggagtactggatgtgtaagtagtagaaagagggagataaaaaggaaaaagataagaaagtagccgataaaatcatgtgataggaaatgaaaagtttaagagagagaaaaaatatgatatgggaagaaaatgaaaaaaaaaagtgagtgtgcnnnnnnnnnntacctttttttaataaatcatattattattattttatgttattttacactttttagttacttcaacaccaaattttaccaaatacttctaattaaataagttagtttttcacagctactaacttctaactattagctaattttgtcaaacataacctaaattattcttaatcaagattattatgaatataggacatcattaatttccgtatgtagattatgcacatgtagattgatttgactcaattgagaaatcttaatgttaacattatcttaaactattaataagaaattctcaagaaaaaatatagtagtttaattctttgacatgatattatcatagtaattgataagttatttattatattttaattttgtgacacctaatatcttaaagcagtagttgaatggacatcaaatatagttaaatgtttgtaaaaataatgattaatcaagaagaaatacattaactcttttgatgatgaatttcttttaaaaaaaccttgataatgaatttaatttctatgataaaattaaggttttggaaaaagaaattaaattaatgaagaaatgaatttttgatatgatcctaatcaattcatattgtttttacgaatagttctttagttgattatcttgaaattaagaattacagaaataggaagaaaaaagtgggataaagagacgagaaagcaacacaaggctttaaattaacaatagtacaatattatatattggtgcaaaacataattacaagagaaataaaacaacaaaacaatataaattagcaaatagatgaaaatggtaaaaataggtgaaacaaaagttcaaaatgaaaatagtaagatgggagacataggcaccacactcattggaaagtgataagtcaagtaaagaattgtcacaaaagtatgtatgacaagtgtactcatccctgtaggaatcgactcggacctgtctcggctttgatggggaaaatcgagttgattaaggatgggatcgggatgttggtccccagccccaccctcgccctgttactattttgatataataaatattttaaattactattatgacctttcaattttaatggattaatgtttgttttatgcatggaattattgttttccttataattgtgtacaatttttacttaatttcacattgagctcaaaaaataaatgaaaacaagtaatttttacataatctgttactaagcacttggaatttcaaccttaatatacaatgtatcatgatcactatttctttaagctatctaaaaataaatgagatcaaacaatcttaattgaaattttaatttagcatattgtaatagattcagtccaattgtaaaaaaattattttgttttttcatttttatgaataagaaaagaacaagataggatcaggggcggggcaaggatgagtttaatttttggacctcaaatgaggatcggggacagggaagacttggggagtcggaggtgggggtgggaagactaaacttgttctagtcccgcctcgttgacatgcctacgcaaaagtatgaaatttttttataagattaagaggttctagttagataatacataaagattattcaatcctttactctcactctaacaagagtaatttctcaatactattcaacttgtcaaatgagaaagattgcatatctatttatagtgtttattccaaggtattactcacacaaggagactaaccctaattatgaagcaaataagctaaccctaattaaaagaaaaattagcaaaggcccaaattagaatgtaaactaaaaaagaaatttaatcgaagatcaaaacttgaacacctaattagcatattttataggtcagctatgttagacaactcgtttactacaattaaattatagatcaaaaagtacttaaataaaataaaaggaaattgatatttgcaacctttttattattaaatacacttttttctcctttttttttcaatgagttttcctaaataccattcaaattttattcctctttctcaaatttctctatctcatctaaaacattccaaactatacaactttttttttccttaaacattattctcggctctccttcctcttcctcttcctctatcaccctctctttacgttaggcctttttcatgtgcaccatctttagctcttcttctcccactttaggtctaagttttgtgatcaagtgaagacgctccttaagtctctttactcttattatagtaggttctccttgcttaatcataggttcatcccttagtttttatcttagatcttatcaaatccaattcagggatcctaatgtcttcctttttttattgattggtgacaatgttttatttttaaataaaattatatatttataaaaataaattaagaataaatcagtataacttgactttcaaacatatgcttcagaagccagatccgcaccttacataccatataaataaatcagtatcctgccttactaatatcacacttctaaacaaagaataagttcgccaaaggactcctcttcagtacacgcctttctaggaatttgaaaccaaagttcaattgaagccatctagtatcgtcaggagccaacaagaaataatagaaatctgatactcatagtgtacctatccagcataaaatattcacggtaaaaaaatcaattaattttacattaatcagcaattagcaataaataagtatttctttactgttattacatgggaaaaacattcccagcaatcattggcaacatatagttaccacatcattgagagaactatattatcaaaattctggtactgaacacagtaaaattaaaagattggacactgctgagcattaagcacgatacaattttatttatacaacaaataaaggcaatatacaagaatatcaaggttttcaaagaatgatattacattattatgtacatctaactacaccaatggggtcatcatacctacaatgacatcccgtttgaataagaatatgattaacaagcaccacccatatttacagttactctgaatctggtagaaaagaatcagctgactggttctgctactgtacatctgcagccaatgcacatattcataagtgggaaacgagacacagataacactattaagcataagacagtgaagtcacagatcctcagacgattctattacctaaaagtactatttccaaaaacaaagttcgcgaatcaatggttattgtcaaagggtatctcatccattttaatgagaatagcataaatgttagtttgatagcacctatcaaatcatctcgagatgacattcaaaattaataagccaaagattcttttttatgcaattaacttcaatattttttctaatcttctattaacaaaggaggcctaactcacatgatacataggagactgcccagcaaattaaaagaaaagctcttcttaatctggttggtcagggaagcaagagtatcaactattcaatcctcacataataatctgcagagttaaaaacaaaataatgttaaaattctaatgtcattttagtaaaaacacaaagtaatatctcactaatggcaccatttatcagtcttcttcccagggttgtgttggacaatatttctccatagactcctttttacgttcgggatcaaggctgcaaagggggagggagaaaaacactggttatgtctagtttcggaaacaagaagttggtgagcaagaaattgccgactgagaaaagaatcatttaaaatcaagtcagttttatcacagacctatttctgaatccaagaagagcatagtgtacagcacttgcacaagccgaagcaggggctatggcagcagcaggaactgctcgaacagcagcagccaaggcaggtcctgcacctgaacctcgctggaattttttcaaggggttctgaactaacacagcagcagattttcccaagccatcactaagactctcataagcctgtaaaatcaagaaatataacctcaatatagtcaaggaaaaaattacagaacaaaatgaacttctgttattgtccaagcatccatgttccttatttacaagggaatgagtaattaatctaaacatacattatgtgatgcaagcaatttatccaaatggtatcaacaagtcaagcgatatttatacaaataaattgagtactaattttgcaacaagcaactccagattatattgtgtttatttacagacggtattttttttttctgtcctttcatgtaacagtaacacatgtttaagaagtcgagataaagcaacatatcattctcaatatctttgacatttcacctgttgaattccttcttgagcatctttaggttgattagatcgaacatctgttttcaatttgtcttttacaggcagaggaactggagaaggtatgcttgcaagaatttctgcttggagcagaatgtcatgggctccggcagctagatgaactccaagtccaacagcttcaagagaaatgcttcgaagaaatgccatcgtacctatttttaaacattagaatataaaccaatccatagaagagcaaattaacattagaatttagtggtccagaaaataacgcaaacaattctataatcattcaaatggatttaaaaaactgaacttagtaatggaagcttcagaagtgccaacaaaaggaaccacaaaaatgaagttgtacgagttgtcgcaactagaaactactaatttacagatgaaaagcttctgtaccagtcactacagggcctaacatgccctgcaaccccaaagcagacatttagagaggagggtataatgacccttaggcctggcgcggatgacgtggatttcgcacgaatagcgccaaggttttctgcagaaaaaccagtgcagaggtttggcgctggtggcgccagtgtggcgcgatcagcgccatgcacactggttgacagcgcgagtagcgccagtgtggcgcgagtggcgccagtggcgctaggttggcgccagtggcgccagaccacccagaggacctgttctcccctggaagttggcgcgagtggcaccatagtggcacgggtggcgccattggttctagaggttggcgcggttggcgtgggggtggcgcggttggcgccatgggttctggcagctggcgcgatcagcgcggcagctcggacaaacccactataaaatggtcattttacgaaaactgacccaaatctcttcatttcttcttcctccagcgacccacctccattgctgagtgcccaagcttcataaaccttgtttgtttcaccaaatcacctcccttaaacctctatcttgttggaaaacacttggtgagctcgaatcctttatcaaaatcccttgaaaatccacaaatctgagaatctctttctcaagggaagttcatagaactcgagttcggcgaggaacggcgacgattcacgaacacccgagtttgggggagtcgtccttgggccttctttgtcgtcattgaggtaagaaactcgagattcgccgtttatttgtgagttggggttttgggtgaatagtgtgacccaattatgatagagctagtattagccttcggtcctttagaaaagtgtgtttagaatgctttggtgatgaaggattagatctcaaatgttagtttggtgaactttgattcttggctctatgtaatgcatgtataattggtatgctgagttgcttggctatgttgtgacatgcaagagccttggtatatggttttgatgtgctcaaaaggcttttggaacggtgtcttgtgtgtgaaaagaaccgttcaagccatatgtgtatccttaagcctttggtctgtatagaactttgagctcttaatgttggcttgcactgagtcttgtgatgactcaagtgccttgtggacatgagatagaccgctgagggtctatgagatggcttgtgagtgatgagccttgatgaaccttaagttagaggactgttgttatgtttgtgcctgatatggctgtattgatgcttgataagtgattgtgtgccttgtatagggcgtgacaccacgggtgtcagtggtgtagaccacaaagcaagggaagaactgcagagctcggctttgccaggtaagttcttggtcccttggggatgtttcccacttgtgctccaccacactccgagggagtgatggttgcattcattgatgattgttgcattctcgtaatgatatgtatgcttgtatttatgcttgaaaatgtatgatacctgttgatagatcttctggccagtaagataagtatgaacctccctaggagaagagcgcacctcctagtttggtttgctcgtgggtgatgatgatcccttaagaccaagagataggtgtgtcccgtcgcggttgaagcctattctcggaagtgccatatacgtgcgtccatacgtaaggggtagctcccaatgggatggcacggatgtgagttccggtctcacactgaggttggtgttgatgatgatacaccgtacatagaacaagatgacttgcttgtattgttataagggtcgggaggccagtatatttgtgatgcctgatgacttatgtcatggaaagtgaactaaggtggaggagatgcctccgaggacactgagcttactgaaatgtatgtctcaccccgtgtggggcttatgtttgtcagatgactcttctggtagagaggagcggtctcagggcggaaggccccagtagagacagtgtctgcttggctgtgtggcagcagggagagctgggaggctcagttttggttcatgatggctttgtacccctgtagagggaatatgtgtgtgtgtgcacacatgttttgctttgtattgtatatattttgtatgccctcgtgtgaggaagaatttgtgagatcaaaagcacgcggatgcttattcttttgtatagacacttcgagtgtcagatgatgtgtatgtacataaccagtttatgttatgtaatgatgtttcctcctttttatatctgttgagataattgtggttatctgcctatggttatgtttatgagattctagatcagcaggggctagtgttattgtgatgttttatgttatgagttccatacataatgtaatcaagaaatatggttttcgattatgcttccgcaaaatttttaattaatgtattatgcactaatctgataataataatgttaatacaccgggtgcacacggggtgttacagggggggagtaaattttgcgaaatattatttaagaatagaagggattcttaagtaaaaaaatttatagtttagcaacaacgaatcaactagttaaaaatgtgtaaagagtagtttggtaaccacttattatcttaattaaaaaaaaaatcgaactttaaacttcttaaaatgtaaatcaaaacctgtttttcatataacctaagcaattaggaaatcctactacaatttaagaatgtccaccacaattttataaataaatatgtaaattagccatagttaaacaacaaactctaaagaatcaattaatccctaattctgattctgaaaccaggagacaaacctatattcatctttttcattcactccatgtagctgacacaatgttcaaattagaatcagtgataacagaagtctgtcttacacaaatgaagataacagtttcatcaggaagtaagtgatctgctaagaatatcaaattaggatattgtcaatcagccttaagtgttgttaggatccaattgcaaggtacaggccttgagtcccacattgaatgtatggtttctagtatgggattcataaggccttgggccttccaacttcaatggttagcttgaggtatggttctcccaagtttattatcaatcggtaccagagttcaccatgtctctcaattgcaatcaagcagcacaggtggtgacaccaggcattgctgtgttcacttgggattatagtcaaatgaccggtacacaaccagaccgcatgggctttggggctgcaaagtgcgatgggatgttaggatccaattgcaagatgtgagattagagtcccacattggaactatggattttagtgtggggtttataaaactttggctctccaactacagcagctagcttttatggtgtggttcttgggactgaatttcaaaaatgttaacactaccaacagatatctcacataaatattttgataaagttctactgctgtagcttactttttattagctggtacatagccatattatacaggtaaaacagcagagaaatatctatcaatctaacctacctctctggacacccttgagcactctccgctcttttttgtagctctgtactggtgatgaaaccagcttagcagcaccagccccaaccgcaatcaatgaccgtacagtaggaagcccccgcagtattttatgaatctacaaattgaaaattataaatgaagagagctaacaagtaatcctgacatctccaaggaatataatccaagttaacagacctgattttgagatatatcttccaaccactcccctacaatagtttcacaaacactggcccaaccatagatgccagaagcatgaacatgtttcaggttaagctcaaccccctgggacaacatacaaacatattatcttagaattcaattaatatattccaactcccaagaaccaatttttatatttatgattcacctttaatagagtttgagaaactctgatttctcattgatcagaaaaatgaaaaagcaagttacaaaataatgagtcatctctatatatagagagacttgaagtctaaccgtaaactagccctatctgttacaaactaactctagttaactgacagctcacagataatagaaaacaaaacacacaaagtaaaaacacttggtggagtaagtatactctaataaccttcagcaacaaatcatttattttcacattattggaaataaaaagggtcaacaatgcttgttatatgatttcagagtacacaaccaggagtgctgatgcgacagcatataaaatccttatatctgagtagacatgcacaacaagatcagtttaaaagagaatggtttatttaaacaatattttgatatggacaaatgtaaggaaacagagttgtcctgtaaattccttgtaaaaaacaacacctatctgccacttacactcaccccactaaaatagcaaaaattgatgtatactgttacaacagtgagccatcaagtgataatatgggtaatttagaaaacaaaagtaagaaagcaaagtaaaacctgggcctataaagctgggatggactcatttttttatctaaacttaatcaacaataagaaagaaattaaatcaaaagttgaagagaaaattttaccttccaagggacaagatttacaagttctacatactttccatgacttaatgctgctagatctacacgattgggactgtaatccacccgaacaataataggccatatatctagcttctgaaaccaaagttaaaatatgaataatacattaatgtgaccagctagatgaaaagcttatcaaattaacatgccttaaatagagtttaaggtgagtattagatcacaagtgtttcttccaacttaattctcaccaaaacactgacaatatagatgggagcaacagttcaattgaatataacacttcttcagctaagtgtggaaactggattgattggtataataattgggatttccatatttctttacatcatattgcagtacagaacactgaacagtccaaaaatataacaaaacaagaaaatataaatttaatcattatagaacacaacttgcctggaaatagggaagcagtgcctctggtgcaattgaatgaaatgcaagatctttatttttctgagtattctcaggcaatgattttgaaccctccaaatcttgacaactattaggaaactgatccttcaatgtgttttttctcccaaagaaattaacaagaaaatcaagctggctttgatgtaggtgtaacagcataggtaaaatagcaacatttaacctgaaaaggagaaagacaagcatgtaatgtatgaggtacttcatacttcatttttcctatatattattttaaaagttttagggagtgctgtcatcaactggactttagttctgaagaaagaccaggatatataatatctctgtatataacaacataaataaatagatagccacgaagattgcaattaacaatgtaactgccatgtaaaactatgaggaacctggcaatcaagagtcatcaccatgataatatattttagccaaaaagacctagttacctagctataaggactacaactacttgaagaaagttgaagcaattccaaaccagtctgcctattttcagtcacaactaatgataaggtttgcagagggatagattataccatcaccaacggtattatatcactttacctgtactcctcaaggggagtaagaggatctggtctcactgcctccaagtccaatttaaatgctctcgaataagattccctaggatggccttttgagtgataatatcctaataccttccaattcaaaaacagaaatatcaaaatctagaacttgtaagtttaaagatgtttgatgtaaatccgtgtaatttaaagcaactaaactttcaaaattaccagtttccaaggtgcatcttggcttctgtcatacagaaaaaaatcttgaacagagacagacatcttagatacagatagtccaccaactggaaatacatcatactgaaatttcatcccagacaatgcaagttccaagcaaacagatgtgtctctcccagaatgctgtccacttttctctgagtcaagccagtcagaaccaccatacattctccatcttatatcaattttcttaagaattacacgtccacaagtctcaccgtgtgatgaactaccgtcagatgaaagcatgccatgataatctacagcctttattggtccagcttgtttgctttcctccgagatgtggttttctaatacttttagagaggtgcctccataccatccaccacttcctctttcaatctctttatgctcctcactcctcagtttgtgtctagaaaactcatcagaatgtatacctaaagatagctccgacagagggcgtaagtcagacaaacaatagctttctataatctctggaaagcaaccttcttgcagaaatgaagtgtgactaccttctggtcctatcacatgcattgactcatttaaagtcaattcatgagagagaacttcaggctcatccaaattcatctgaccaacctcaattaagcttccatcaagtggcatgcaaaaccctgattcaaaaggataagattggtgtgcattattgttatttacttgaaatgcatcttcacatatttcatccatcaagccagctatactagatccatgcattgaaaatgtttgaggggagcactgtttagaagttgcagacatcgaattgttgttttcatttttaaattcattccattgctgtgcctgttgaacattatcccacctattctgcaaatgcacaatagattcctccacatcaggtgcaaataattgctgaagttgagcagccaaacgaatcagagtagcagttgtattgtagcaagtttccacagaaaggtgagatttagataattccagttcccaaagaagaccactagcacagttcgttttcaaaatagcctctataaaagcctcctgagcaactttaaagtaaccagtcttttgaagatgttcaacactataaatgccagacaaagaattcatttctgacattaaatgaagaagaagccccaggtcatggactctgatttggaaaacactttcaactgtatctttcgaagatgaatttgaaagagttaaactggatgcagccaacaaacacgaaacacattgttcactcgtatcttctttgatagaagaacagccagactctgaattaagttcactctgaactacaagattcttcatataaggctcatagctcaaagcaatatcaatcaagcagagaacaaaataagtcgtgtaagagatattctgttccttctttgacatactagtatcacctgcatctttggtattagaagcaggcaagctgaaaaaggataatattgcatcaaaccaatccaaacgaccacctacagctaaaaccgtaccacaactgacagttatagatgtaatactatgggaaatctctgggtcagagagacaaatgacatcagaaccagcacatttggaagataatgcattagaacctcctccatcacctcgcttcacagtggagttgctacaagtaatcagaagaaactcatgatcaggaactccggtgacaaatccccacaacttgccttcaccatgagttaatcggaaaaaactcgcattcttaacaccaccagtattagtgacagacagcaactcaaacttttgaaccttcagcctgaattgactccacattccaggaatttcactcttgattgaacttttgatactcgcagatgtatccctactaataagaatttctagagaatcacattccaaaaatactgatgattgtgagacagaagattccttctcaatattggcttcctcagaagttacacatgccaatgcattcagcatctgatgtagaaggtgatgtatacctttatattttgaatcgttcacattaatcacaacttgagatagatggacatgtatgagaaatgatgagcttagaatcatctcttgttgagtttgagatttccaatcttccaaatctttcactgttgatgcagatgcaaactcatacccccttcctccaatatcatcttttccccttgtttgctctgaattagcaaataatctggctttcttagcaatccaaggaccagtcacttgacccccctgccaaacaacacgaacaacagagaaacatccccttctatgaaaaatagaaaagaagcagctagcagaaaatttctcattctgcacatcataggaagtgattctaccattctcattacttgatgtgatcaagtagatgtcaagatcatagaaactcaattgaagagattgagcagctaccgaaggaaaccttttctttgaacttgcatttgaagtttgactataatctggagtgtaacctttgttcgaaggtgatgatgaagtaaaatcaagagcaatgaactgttcccaggaaaatgaatttttatgatccctatcccttccaaaaggaaaacacagtatcactcttgcattagaaattgatatatccccatgcaaacattctgttgtggagaaagatgtcacacagggaccagaaccttccttcatatcactctgagatgatccacacttgttatctgagacttcagacagaatttcctttacttcattatgcatttcaagtgatttttcaacttcctttatgagattcatgagcacatttattactgaaaagattacccagaaaataaatgggggcaagttcagtgagaatgacgtcatccctttccgacaaccatctgataaacttgattgcgttgaacatttgcaacttgtgacaccaaaagttctgaacaatgtaactttcaacaagcaatcattatttccaaatggaaaatctgttgcaactggcccaattaatgaatgtgaatctacattgtaagaggtagatgaagggagagcatcaaggaccttagcttgtaggtgttgaatcaaagcactttgatttttagcatcaattccaatgttcaagaaattagcaacttctacatgcttcacctttccatcaagagtcataccttgagggcatacctaatgggtttacaatgcatttagagttagagtggaggaatttattcaaaaacaagtatcagagagtagatataggtagataggcatcacaatgcaagcatgaagccatgggtaaagagaatgcaagggggtttgggagaaagcatagaagtaaaatttacctgcaaagcaataacaatgtcattgcactctgcaccaagataatcaatttgtaatccaaccttgtgaccgatttcagtactctgttcatcaacgcagaaggacaaaacaacagatattccagcaaaagtagccctgagattggtttccatatgttgctgttctgtttattagtatcataacaacattagtaacaaacaaacgatcaaaaggaaacagtataaattttgtgtgcttatttgttcagcacaaacattagaaaaattagtctctcgtatacagacatgaaaagatgcaatatgcaagagtaaacggtacatataaagtttgaaccaaacacaagatataaagtttccataacaaattaacaactaaaaataatagctttgagatgtcaagtaccagatggaatatgcaaagatccagaagcaaggctggatgcagcagtaatagcactataaactgaatatgtccaattccacattccactgctccctaaagctgattgagaatttctcattccatcaaaacattcaaaaaactggtccacactgcaggaattcccataacatatcaacagattcagagtcaataaatgtagggaagacctataaactgctaataatacatagttgatttagttataatgtccataatagatatcctaaggaagtgatatgtgttaacattgcgtacattaagtaaaattgcacaacgtacacaaattataaagtatacctaagagtaatcataaagtttcattgataatacagtgaacacaaattaatttatactaccaagttaaagtttttagactcatctgtaacacatacatccagtaaactagaaaattttcaaaattttcaaattgagtatttctttttctctttgggaggggaagatcaatttaatcagaaagtagcataggaaattttactattcaacaacatggagcaaaagggaatttttttattatgagattgtcaggtgaagtgaattggccaaactcaaaaagattttcagaattgtgatttgtcaaggtctccagagagactgccaatagcaatttatttcaattaaatgcttctctaacaatgataacatttaaaaggggaaaaagaaggacctaccttgccgcaaaatcaggttcttgaataccatctttatgatttatatgagtatacaatggcacccaattggatataagatgagccacaggaagtaaatcttcagcaagggtttcaggttgggttaaagaagtgtaatcagctgtcaaactaccattagcagtcatcatctcactgggagcattggtaatagaaactgaagttgatgaatgacagaataatgtagaattcaattgggcagatcctcttgagttgtgatttgtgtaaccttttccacccttatttagattcttaagagtttcccatgactgcaatagccatttaatagtgctaggttgaaattttaacactatgggatcaacataaacatcagcatccaccttgcaaacgtccaaagaaccatttttccaaggaatacttaatttaatatttccactaaatccaccttggttcccagtcatgattggacatgtagctatatttgaccccaaaacaggttcaccacatcctgctcctgattcatgttgaaagtatgcatcttcattatctattttgagaagctcaataactgctccacgaaattttacaaagtttgttagccggcttataccaaggacatcaacatttgaattggcatcttcagatagactagttccacattgtatttcagaaatctgaagaactaaggaatgacgacaatgtgttttattttcttcattatctaaggatggatcaaatgcaacaattatatttgttattgtaacatggaagcttgtgagcaaccactttatcatctttgcaatagttttaacaccttcatgaacatccattgaagtcgacttctgagcatcatctaatatttcatgctcagtcctcgttgagcttttcaggtgttgattgtcactatcatccaagccacaagtttcaccttcactagttgacattttatctttgaatggagaaactactatttcaagtccattcacttcaacctcacaacctttaccactccaaggcattttaatcaacaggtagccaattgaaccttctttaaccattaacgatgatgtcttgccaaactgttaaacataagcagaggaaagcaataaggtaatgaaaaaaataaaaaaattactctgagaacaccttccaattctataaaaataatcttaagttttcgttgtcataaaacttccaaccctacataaaatataaaacaattactcttgatggttttcagctgagaaaaccttccaattctataaaaataatcttaagagtttacattgtgataaaacttccgaccctacatgaagaattcacattattcctacaggtagcactatttgatatacttaggctctatttgaaagaacttatgtacaacttattttgacttatcatataacacaagcacctgtgtatgtgtttgggaaaacttatgacaataacttatgatacgtccataagctattttcaacttatttcaataagttctataggatagctaatgcagtttatagcttgtataaaaacaatttaaccctatttccccttcaaatataaaaacaaacttatacataagtacttttatataagtaattattaataagaccttaattaagttatatccaaataggttcttagtccttatgacatgcgtgaggagcatatcaagtgacagcgctatcaggaaaccactctaggatccaccaagcctgccctgaccctggcgagccctaagacccaactcaccaaatcttatatatatcaataaaaagaaccaaacttgaaaattaaatctctcacctagctgaccaaaatttgaagttacacaagcccacatgactttacgtcctaaccttaaccatacatacacgatcaacgataagaattttaaccaacttaagtttagtcgtcgactgccttcttgggcattgataacacactattgcctactttcattccatcattcacaccccaacaccttttttctttcattactatcaacctattcatgcatacatacctcactcaatccatcaacattaacaccaccaatgcctagtcctaggaattttcccaaaattgaggaacagaaagaagaaaaaactaaaacctttgagttgacgaagtcgacgttgagcgcaagatcgaggagttgaattgtgccctgcgagagttgaacgtctagctggtcgaggtcgatttcgccgaggataaactggcccagtttcttcttgaggaagaacttgcaaaccctcttgagggcccaccgcgagaacgtggcctccgccgatttcgcaaagttccgccatggaaacatggtttggttgaatgaatgaataattgaattgggcgcgaaattagggttcgcagtgagaatcaggcagcgaaatccgaggagatgttttgggatggtggcggcgacgacgacgaaccataaaaaagctccatacgataggcacgcaaccacgaaattgtaggatgaatagaaacgatggttttaaattggaaaaaacaaaacaaaggagaatctacttctaccttctacattttcgtcttttcctacccttttcccttcgtcttctttctgttttttccccccacttcaacgcaatttttactttatcctttttcaaatttagtgccaaatattaaaatcagttcaaaaatttaatttttactctatccttttcgaatttagtgtcaaataatagtagcagcattaattaaagaatttaataaataaatctagccaaaaaaaaatagatgtggtaacaagggtcttaaatgataattgaagcattaataaaataaacaaatctgtccaaaaattaattactttaataaacaactaaaataattaattcaaatatcatgatgattttttatcangaacgatggttttaaattggaaaaaacaaaacaaaggagaatctacttctaccttctacttttttgtcttttcctaccattttcccttcgtcttctttctgttttttcccccccacttcaacgcaatgtttactttatcctttttcaaatttagtgccaaatattaaaatcagttcaagaatttaatttttactctatccttttcgaatttagtgccaaatactagtagtagtattaattaaaggatttaataaataaatctagcaaaaaaaaaaaatagatgcggtaacaagggtcttaaatgataattgaagcattaataaaataaacaaatctatccaaaaattaattactttaataaagcaactaaaataattaattcaaatatcatgatgattttttatcattcttatgttaaaattaattgttttaaaatttaaaatactaattatgttggcaacaaactatgtaaaggataaattgacttacgttaaaaaataaaaggtaaaaattaaatttttaacagataaaaaatcaaaacaaattttnnnnnnnnnnnnnnnnnnnnnnnnnnnnnnnnnnnnnnnnnnnnnnnnnnnnnnnnnnnnnnnnnnnnnnnnnnnnnnnnnnnnnnnnnnnnnnnnnnnnnnnnnnnnnnnnnnnnnnnnnnnnnnnnnnnnnnnnnnnnnnnnnnnnnnnnnnnnnnnnnnnnnnnnnnnnnnnnnnnnnnnnnnnnnnnnnnnnnnnnnnnnnnnnnnnnnnnnnnnnnnnnnnnnnnnnnnnnnnnnnnnnnnnnnnnnnnnnnnnnnnnnnnnttatttttaatcatttaattaataaatttttattttctcctaaaattacaaagaaaaaacaaacatatttatgaaaataatattcctaaatgtaattatttatgaaaatataattcttaaaaatatgcatattattctttaaaacaaatgcaagtcagagtatctatgaagttatcaattttaaatacccataccaacaaagtccaccacagttggtaaatgttttgcctctttaaatatattgataggaattcatttttcttttcatatgtatagagaaaattttattttttttacaacatgaaaaaaattattgaaagagataaaattcgctttcttgatttatatgtgttccaagagttggttttatagcttccagctattgaaatatcttgcttttagcaaagaaagaaaaaaaaaagtatcaaccttaggtattttatcttatattaaaacaatttaagtgaacaccataatataacaatattttttatgcataatataacataatatttgaacacgaataaatttgttttaatttaaaaaagttaaacaactcatacttttataataaaaaattgtatttaatttttgtttcaaattaaattattaattgaacaaaatataaatattattggttctcattgatataataataataaaaagaataaattatatttaataataaaacgaataaattatatttacacttactcatgtatttttattaaattgcatatgatattcttcctttttatgtattattggtcctgacggacacgctaagagtattgatgtcactagccttgatggtgtcaatgttcatggaaccaaatgcagcggtgataatgatcaaagttacaacgagggacgaagaggtgatagaagtggatatgacgacgatgactacgatagttgcagtgactaagatagtgatgattgctctaaaaggagtgggtgcgctatgttggtaggtgaggaggaagatatgatgttgtcgtgggagagggaggatgaggaaaaagaggtgatggcaaatgaagaggggttgttgaagaaaataaggattttgcaaaatccaatatgtaattttgagaagaaaaaaattaggatattttatatataaattttcattaaaagtcatgtgatcataatgtatcttaaattattaaattgtgtttaaaaggggaaaagtctccatataatataaactaaataattaaaaaaattacaaaataaaaaaaagaaaagatatcagatacaacttaaaaaatacacgagaaaaatgaatatagtttactcttataaaaaaagtatgtccgaatcattcagaatttcataaacgatgaaggtcatatttacaatacagagaaacgaatcaagtaactgattgttcaattaattttgttcggaccctttttttctcttaatgtccttatgacctatgtaactgttatcactttctcgccggatttatggtgttttgtgggcttttttttcctcattcacaaaataaaatataaacttttccaataacaaaaattaagatattattatattgttaaacttaaatatgtttttataattaatttttgttagaatcaatatgctaaggtacagttacgtaaagtgaaaagaaaaaaattaaattttaaattaaaataaaatataaaaatatgaatcttatgtctttgtttatttatattttttttggaggtaaagaatttaagcgagaatggtttaatatcggatgcttaaatattctagcaagagacattaaatataaaatactaatagtattttctctaatttaagaaaaattctaataatataataagttattagatttcaatccatataagcatgcattaatttgttgactttgtatatgaatatatgaatatgttaatatttaatatatatatatatatattaaatatattcaagagtttttttgtatctctttttctccggaaggaacatacccttggttggttgattaagtagacaattcgccatatagtcacctcaggtgataagatacaactttgccatctttataacacgaaaaacacaccgttgaaaatgatagtttgttctttttacccgaaacatgcctaggaacgcgtgaggattattatctaaaattttcgtctgtttcctccctcgtatgtatggaatggatctgctgcagtttgaaaagagaactgtagtcagcaagcatgcatattatacaattttctctcttctttaaaattaattatttagatgatgaaaattttaagaagaaaagggtgaaatagaaagaagaaaaaaaataatgagtaaaaaatggataaacttttaaattctttgaagtaagagtaatagaaaacgaataaaagaaaaatgagtggattttttcctaggttttatcctaaaagaatgagttaatattagaataaattgtaattttgtttttttagttttctcaaatttatgattttggtctctctagattttaattgtaatatttggtcattttaattcttataaattggtgattttgttctttttaatagattattaataaataattttgattaattgaattagtaaatttattataaattaatcaaaattattaattattagaaaattgaataaaaaattattaatcataatttttcacaacatctcttctcttctcagttaacacttttttgaccttcattcttgtaagcgactcactaacaccatattagacttaataatcttttactaaagttttttaacgattaataatttttatttaatttataattaatttaaaactctaataatcacaattatcaattaataatttattaggaggaccaaaattgtaaattnnnnnnnnnnnnnnnnnnnnnnnnnnnnnnnnnnnnnnnnnnnnnnnnnnnnnnnnnnnnnnnnnnnnnnnnnnnnnnnnnnnnnnnnnnnnnnnnnnnnnnnnnnnnnnnnnnnnnnnnnnnnnnnnnnnnnnnnnnnnnnnnnnnnnnnnnnnnnnnnnnnnnnnnnnnnnnnnnnnnnnnnnnnnnnnnnnnnnnnnnnnnnnnnnnnnnnnnnnnnnnnnnnnnnnnnnnnnnnnnnnnnnnnnnnnnnnnnnnnnnnnnnnnnnnnnnnnnnnnnnnnnnnnnnnnnnnnnnnnnnnnnnnnnnnnnnnnnnnnnnnnnnnnnnnnnnnnnnnnnnnnnnnnnnnnnnnnnnnnnnnnnnnnccatttgacaagtaaataaaggagcctattgagataattttcagtgcacattgttttattaagaagaagaactagtacattatttgtgtggatgcaaggataagttgcaaaattaaatatataatataattatatacatttagttataactagatataacttagtaaatgagaaacaaaagtaacaagattagaatatataatatattttataaaataacattgtctatttggctcataagttcacaaaaagttataaacaaagttcagagaaattggtagagtatgatgcacttaaattataattaatcaattcacaatacaacaaaattatattttagatctggaactcaaatataatttcatggtcagcctccaaatcaaatataatttcatggtcagcctccaaattatgataatttgcaaaaaaacttctatacaaaatcaaattttgcactctttctccatttattgtaaataatcttgcattttgtagtctcttacaaattaacatgaatgaattttgcttctttcataaatgagtacataatattatgcacatcctaaaattaagattaagttcttgttagatatttataaaaatttcataagcagaagtagttattatatatagtaatgaattactcaccacgaactgatacaagctacattagagcaagtacctacaaaatcattacttcaacttgaatatgaattagtaaggtgaacctcaactaaccatagtagttggacatgaacacaagcactaaaaattactcagttatatgatatagcgagttttcttaacaccaacaaaaatctaaaatgtatatcaaataaaaagtccatatctaatgagaagaaagaagcaacattttcatctctcaaatttcgaataaacgaactttaacataaagaaatcaaagtgaggaaaacaataccacaacattgtagtagaaaacgcatcttgcaaaaacaaaaccaaaaccaaaccaaacaccaacatcaatttcacaaaataaaaatgcatcttagaaaggagaaaagtaaaaacttatcttgaaacaggctttgcggtttcaaagggaaaatgatccaataaagttttttcacgcatgtccatgatcttgttaggtcaatggtttttcgttggatatggtatatgctgagagctacaaagaagaagaaagagaagttagggtttgacgaagttgggattttctaaaaaaaaataaggaaaatgtaaaggagaggatcataagcatattgatcggattattttttccaatatcagaacgggggactgaaatgtttccgttgagagttttaaaatgataaagaagaaaaaaaaatgaaaatgagggacaaaaaaatgagaaaaggtgattcacgttttaaatttgaaaaccaaagctacccccacccgtgaggttgaggtgccaaggacatccacgtggatgctggacttttttaattagagatagtagaagaagtgttttgtgtaaattcttttagaagtattttttaaaaaaatataaaaaaatgagataaattttctcataaataaaaataaattttttattaattaatttttaaaaatttattatttttttaaaaaaaatgaaataatatttatgaactaattaataaaaaatttattttaatttattttttttctagactaaaaagtatttctggaaaagttaaagattcagacattcctaacaagattataaattattaactgatatatagatattagataccgtcgctccccacctcccacgtgcaacacacctcgtggttttgtttgttcacaacttcacattgtcaagaaaatactagcagcaaacatatcgaagaaaatttaaaaaaatatcctaagaccgacaaacacagtttcatttatttatgttttgtgcttaagaatatgcaatttaattaaattagtaaaataatacccaaatatttttttttgttaatagtatgtttgaatagaaaaatttgagttaataaaaaaatattttaaaatattttacgtcaaaataatttttttggatattaaattcaaagaaatatgatgaaaattaaattactttgcctaaacaaaaaattgaaatacacaaatttgaattaatttctctaaacaaaattataatgaaatatataaaaattaggtaagatagtaagatagattagtaacatttttcataaaaaatactagtatgttttaatgtttagtttctctacaagtagaaaaagttttaacttagcaactaatcagaaatgtggtggtaagaataaagcaattgatataaaataattaaataataaagtcattattacagtaaaacggtaaaagagaaatttatatacatctttttttttgtctaattatataagaaaatcttatttgaatcaaataatattattataaaatacaattatttaacctaattatatatttagaactcaaattcaaaataattaattaaactgaaatatcttaggcttcatattaatttatccacatgtattatttattccttaatctttgagaatatacatcaccttttgcatcacgaatctttttcttatcattttgggacggcaccttcacagaagaagaagaagaacgatagtaatggaaatcaagccgggtttgtcagcactcgttaccggcggtgcctctggaatcggtaactacctcttttccttaacgccattcatattcgtctctataaatatcatactcttccatttgactttgcaattatccgatttcaaatattcaaaaacaagtttcagttgtctttaggaaccgatttaattaaactagctatgctatggagatttttgccactctgaaattaattaacacaagagcaatgttgtgttgtatttttacacgcttttttgaattgaagatccgattccttcactctttgagattttgtcgcggaagcgctttgttcatttgtgccgtttcgaaatgaatccgtagtttaattaggaagaaaagagattgcaaactatagagcacgtgttcaaacaactgttagtaattgaattaacactatttgcataagcttttctgtaagtacttatgagagaagcaaataagtaaaaaaaatgaaacaaacacctcctatataagctaaaattagcttatgcataagcataagttaaaatcaacttttggagaagttaaaatcatttagttctgacttctgaggctttaagtatgataagctttggtcacagacaagtgaaagaatgataacatgcctcgtgatttgatacatctgcaaccaaaatatatgcttggtggaatttggaatttggtttaaatcacgtgattcacttgtttatactattattgcgtgtgatgtgactctctctatatttttttacaggcaaaggtcttgcactagctcttgcagagaagggtgtatttatcacgatcgtggatttctctgaagaaaagggaagacaagctgcaatcctcattgagaaaattaacaccaattttcattctaagttaggatttccgtctgccatatttgtgaaatgtgatgtgagtaatgcaagtaagtgagctattgtctagtagcaagacattcatcaggcttccccgtgctagatgttggaattgcctccttatgggctctatttaatatccttaccaaaccttcttgtgttcttcttcaattcaaatatattaatatagtgaagtaacaccacttaacacgaaaatacatatttatagagattcacatggtagaaggcatgtgataaagtttcataatctgtaaaatgaatgtgtgttccaagttccaactatcatgaagtagcataatatatacatgtaaatgtcataatgaatgcacctgctgttttggttgtctttagtttccacaaataataatatattaattcttagtcactgacaggggatctagccgctgcatttgaaaagcactttttaacttatggaggacttgacatttgtattaacagtgcggggattagttctcctgtaccattccgtgatgatcagacggatggcacccgaacatggagatacactgttaatgtgaatttcactgctgttattgattccactcgccttgcggtaagcttgaaacatgacctagtttatcgaatatcatttaactaaatatttacttaatgctgccaaaagaaagttgttggttcacattcttagtgacaaaaatattataatttgctcctgcataatcatattatcgatcacatacataatttccccacatgctgtatatgaaataaaagaggttaaatccattggttattgttgacattcattatcttcattttaatagattaaaaccatggaagcttccaaaaggcctggtgtgattatcaacttgggttctgcttctggtctttatccaatggtggctgacccaatttacagtggctctaaaggtttgtcatataccagcttttattagggtatactccttgaaactttttgctgaatttaaaaaattaaatttgccacacaaaagagcataaagacctattcaattcaacttaagtgaagctgttaaaacgagcatatgtgtggatgaccattgggcttgaagtgtggattagcaacagcctcactgttaccttgctcgaaaatttaaaactgctattcacagagctgatttacagaaaccctgtttttgtgacataataatgctaaacaaagtttttatgtacactgtctatttattgcgattttccaaaatttctgtatttctggcatgattaaaaatttatctgcgagaatggggtttgctatcatcaaaatcagaaatcttgtgattatcttatgatcctccgagttgcacctcctctttctttttttcccccaaataaaacttcttgtagatcccaaaaaaacaaaaaagaaaaaacattcactaaaattggcatctctttctcgtggattaacatatattttaaaaacttttaatcaacaacaacaaaacagccttattccactatgtgaggtcgactacatggatcacatgatggtatttgacttagttaaagacaaaatcttcaaagatattatttcccatgatatccatcttaacaacttcctccaatgtccttctgtgtctccctctctcccttttcgtaggactaaaaaccgtgcaatctactcttgttggtgcttccagtggcctttttttatatacgagtccaaaccaccttaactgattttatgtcatcttttcttcattccataccattatctcttcgtgttcattcattttgaatcccatcctttcttgtgtggccacacattcatcttaacattctcatttatgatactttcacatttttctcttcttgtccctttaaagcccaacattcaataccatagtgtatagttgggtgtataactatacgataaaattttcctttaagcttggtaggtattttgtgatcacaaataactcccaaaccccgatgcctttctccattttaaccatttcactttgaaaaacttttaataataatcaaatactgagaagaaagcttttaactgaaaagttgtttccaaggacaaaaaaatataaaacaaataattttagcctttcagtgagagttatatgatagtcttcatatctccctctctagaatttgcataagttactatactgcttcctaaaatgttattatgttattgtacttctgcaggtggtgttgttatgttttctagatcacttcgtctatacaaacgtcaaggaattcgagtcaatgtgctttgccctgaggtaagacctatattcgaagcatgagtatttttggctatattattaatctataatctgtggaaatattaaatactctgttgaaattgaccagaactttttaaacaaattttccttatgcactgaaattgattagtacttctatgtttttctttgttaaatcatgaatgtgttttttctttttttggtttgagaccctggtattcaaaagctactttgggtcccaactaatgttagtcaagttgagtggattcacttccaatgctttttttttttccggttattggaaccaagctccttttctctggaacctacatgcattgaatgtgttttgatttcaaatcaacatttcttgtaatggtttgttacgaagtactataatgtgaaaagtttggtgcagtttgttgaaactgagatgggaaataagattgatcccaagatcatcaatttgatggggggctttgtacctatggaaatggtggtgaaaggtaagtctataattttttttgttctctcatttagcttagccaaaaagtggttggtgggcgtgcctgtaatttgtagattactaaatcataaatttgtaaaggtttgctttatattgtaaatattgcaaaagttttgggggctggttgattagttttccattaccccctattgcattgcatggacatctcctaaaaccaaattgtcaaaatggtcattgtcaagtcaagaagaaaagtcaccactgatatatgattttcagcaacaaaggatggattttgtcattttcactctcccttccaatgcctatgcaataatatcacaatgggtagagagaaaagaagaagatttatcaagaacctaaaaatgctagaagcacaaacaacacaataagatgagccaaagactaaacatagaaacaaagtatgtcaaatatatcaagagatgactatacgcaaagcagctaaacacttgttaggagttgtgcaaaccaagacattggaggctgggcatcatcgaattggccagtgaggtgagtgttggagagaggactttgtgggcttttgcttgcatggaaaagctaaattgctgaatggagcatcagagcatgctagtgcattgaaacttacgttgtggtgcaacttcagaatctatttggcaattcactgatgatcatatagtggtgatttctcttcctgtcaatgatcattactgatcatgattagttgagatgtagtttcactagtttggccctgtctctagtcccaaatgtagtatatcacctgtcattgctttaagcttaataggatttaacttgggggagaacaatatctaaaacaatatctcatatcatcattattttatcttaaaatgttttacatggatgatttcttaagtgatttccatatttcgttataattcattatcaatttccttgtttgattaggattagagtcttgtataaatattaacagggtttgatgctatatattttgtatctatttacatcctagtttctttgttgatttgtgctgttaataacattatgtttgtaattcatacacgttatgagaaaatcgattgagttaataatagtgatttgtcaatgtttctaacattatgttaataatagtgatttatgctgttaataacattatgtttgatatgaaagtatgtcaacctctcaaggtgcttttgagctcattatggatgaaagtaaagctggtcattgcctatggattacaaatcgtcggggcatggagtactggccctctccatctgaagaagcaaagtacttgatacgttcctctcgtttcaggaaaagatccgatttcaaagctccatcaattaaacttcctgagagttttgagaaaatgtgtgtatttgaactctatctctcttgttataatatatacatgcctttggaagatatttattttctatttccatagtgttagaaagcgcacatttatatcttcagattggcatatctatcgactatttcttctcacaattttattaatttaaagatgcgttatttactgtttgcagagttgttcacaccttgactcacaactttcggaatgctaccagcatagtgagaacaccactgagattacctgtcaaaccaaaacatgttcttgttaagataacttttgctggtgtcaatgctagtgatgtaagttatatctttctgaattctgagaggacttgtgtatgcatattgttgaggtttttttcaattctctctcagacatgtccaatccttaacttcatgatagatagcctcaattgtggcaaaaagatacagccttcaatgttgaactaattgcctagaagaattatgcattaactcaacaagtgcatgttcaaatcagaaactgcatggcttatagtaaaatacatactaatgtaatatgcttgtggcttttctgtacatctagaataaggcactacactaagttggaattacttccttaaaacaaggcactatgtgtttattgttcaagaatgttacaactcttgaacttagatttatgtaagtaggtgttgtatgagtagcaaaataagaagtttttttcatctccttcaacctaagatcctaggcttaccataccttagccttctagagaatttaatattttttagtattttcaatttgattcttcaaagtctagtttcgtagttgaggcactaactttttattcatctcggttttgtccgattgtgcacatacacagtgcaaataaactttatgaatactgaactgaattctcatggaaggatctagagaaactctaaaacacacaaggattcagttgataaacgtatcttttggggaccataatattatttttatagaatatgataaaatgttaataaatggtaaaaatctgataagctgatttttttttactgttttatttttcacatgtataacttcctacaagagcatgtctgttcaaaagttgttttataacaaaaatgagggcagagttgaaccaaatagatgtactctgagactttgacacacagatttgtttggtccaagggaccctatgattgataacttctcttaggctttaataattttgatttgtaacttaagcatgacaggagaaatggggacaaaaaatgtggtatgtgtctctgtgatgaacattattgatttatcatgtcagatgagtgtgatcctggataaaacatgtggagtctcatcatatcagatcctcttgttttaatctatacaactatacatgtttgatttcaatgacttggaaaaacacagtatctatgttgtgtaatattacatctttttgtgcaatacaaagcttctctccactcagtctttcaagtgctataatcaataattctaacaagaatgaataatgataggtaaattttagctcaggccgctattttggtggcaacaacaatgatgttgcttctcgtcttccatttgatgcaggatttgaggtatagatatatcccatgtgtagatatcttgatatgaagcctaccactttatgccactagacccttacttacacgtgtacatttttttaatgtttatattgtaggctgtggggataattgcagcagttggtgattctgtcactgacttgaaagttggtatgccttgtgcattcatgacttttggaggctacgctgaattcttaatggtgggtagtacttaacataatgttttatattttcctttcatattaatgacttaattattagagtttccatgtaccacttatttagaaaaccatgtgtttggttattaagttgatctgatgatgatactgcagtgatatttattatgatgtaagttattgaagctgtttttttacttgggatagattccttcaaaacatgctcttccggtgcctagaccagatcctgaagttcttgccatgcttacatcaggattaacagcctcaattgctctagaaaaggttgactaatataatattgtctccttgcttcagatgtatccttatttcttagtatttgaaattatactcatctttgataccaatgtaaatcaagccttttttttttttaatttatgtactatcttctgtgaatcttccactggcttgtcttgatcagagtttccttttttgtacactgaaaaggcaggacagatggaatctggaaaagtggtccttgttactgctgcagcaggaggaactgggcaatttgctgttcaggtacttgataaatcccatgccacttttctcaaccatatgttcttgtgtatatgtttccaggaactattcgttgtaacaaattgatcgtttcttgatattctgtagttgtaggctgaacctgggaaaactaaccaatattttacacacacaaaaaaaaagcagaatttgtatcttttactctatttttttgcactttctatattgatggacatttatcatcatactattttattctctctttttttccaagcattagttgttttgagatcacacaaagtactcttgtatatatttccttgattccttaagaccaaagataagtgcccactattttaagacaaagattgcttgttctttttccatttcttattaaatgcttggagatgaggtcctattctatgaaacaaagaaaggcaaaagaaagtagtcaagatagactatctcttgacttaaaacaatggactacacaggtggagtgtagtaggagagtattactttgtgtaaaagaagcggttgaaaaataaataaacaaaaaaatttacaaagcttgctcaaatctattaatagataacttggggggtacttcaatcttgattttgtagtgtaaactttatgcaatttctctgcataaaagtttctttgcccggcctattaatttaatcattgtgcagctagcaaaattagcaggaaatacagtggttgcaacttgtggaggtggggcaaaagccaagcttctgaaagatttgggagttgacagagtcatagactatcataatgaagatgtaaaaactgtatgttttctaaatcctttgattctttttagagttctttcaaccataactgctttttttgaaacagttaggttaaaaaaatcattataaccaaattaacctaatatttctttcactgacatttggctccttagtattaattctcttttttattgtgtgtttaagatattcaatatttttagcatattaggatatacatatatgtataaggtcagaccctaaaaatgcgcattcaatgaaatcaacacaattaaattatgccattcatgtgttttcaggtactttatatatttagctaattgaaatatccagcaagttgctgtttagtttctaacaaacgatcctaattctattcaaactgcttatgttatctcttctattttgttgaatgaattttcagagtgtttccagaatgtccctgatattattgactattgaattgagcattgatactcctcaatttctgttcctattatagtccttttttatcatacaccagcaacaacccagtgagcctaaaaatataaaaagaaaatccttgaattccagaaaaaaaaatatttaccttttgttgaataataggaaagtagaaattcatcttaaaacccgtgtaggaagaaacatcacaagtcacaacatctctgttgagcaatttgcatgatggaatacctataaactctctttaaacaaatgtgctctatcaaacaggcaaacgttacaatatcatcttattacatttgctgacaaaagctgtgaaactcactggacatagacttactggttctaattgccaaagaacaataattcataactgaaaggacagaatattggtggagaagtcctttacataccaaagaccaatcaaagaccacaatttaaatctttaatgaatatcaaatgttcaaatcatggctccaattttagtgcaaattggcatcttactttgttgattctgttttggttcttgtctttattggaacaaattatgtaaattgatttgtaccaacatgataatttttttacttaattcttcaggttctaagggaagagttccccaaaggtattgacatcatctatgagtctgttggtggtgacatgttaaacttgtgcttgaatgctttggctgtccatggacgactcattgttattggcatgatttctcaggtttttctttttttcttctcatgccacatttttcctccacagcacttgtgaaagtttctttgcatctataacatactgtgctatactatctttttttctgagaggtagtaccgactcatttagggattttaaattcatgtaaaaccttggattttatcctcatttaagtgtagtgaaaattaaatttcaattattgtggtattcactatcaaatccactgagttatatggaacgtggaattctgtagcccatctctgatgtctggaatgaaatttggattttagctagttatattatcataatatagaattatttttattgttagattccctttcccatttatttgtgaagtctgttagaatagtgtatgacactggattagaaattgcagtaagctgtttctgacctcttaaggaatctattgttaatgaacaatattgatatcgtattttttgttttcgttcattccagtatcaaggagagaagggttggacgccatcaaaataccctggactattggagaagctcttagcaaagagccaaacagtggtatgtagcaatatgatgaagttatgcactagtaggcagccactactttattattttttcagatttcttgattcttatttcattgtcatttaatcttgtgatttgggtagcttaaaatatccatctcatgctgaagtgaaacattttctgggtaggaaagtttaacttttaaacctcaatcctgtcatatcatgcagtgatgaaatgttggaaggacaaatactagttcttttttagtaattagttatgaatatgactattcttttgtttcagattgagtagtttaaattatctatgtactgtctggctaattatttgtatatgatttctgtattaacctacagtaaaaacaccatagactaagtgcagaaattttggacataaaaaacctatactttactaatttctaaccaaaatatttataattttggacaagtggtatggtcaactcatcaaccacttgttaaattgtttctaactgaactcttttcattccaagaattgcaatctcccgtgcaaatttccattttatttttctatgatttacttatgtttgttcataattccaaaatttcagtctggctttttcctggtgcaatatggtaacttgtggcaagaacatcttgacagactatttaatctttactcttcgggaaagctaaaggtaacttgtacacattccattcatatctatggatcaataaaagtatcttcattaacagtatatttatttgatttttgctagttgctatacttagcagttgccatgctagtttgtgatccttaactttctcgtttcttcatacaggttgctattgatccaaagaaatttataggcctgcattctgttgcagacgctgttgaatatctccattcaggcaaaagtgttgggaaggtatttacataacaaatacatttctatttttgattttgtgactattttgtaacaatctaatgagatataatttctctaggttgtcatctccgtggactcaagcttccttcctcaagtggccaaattgtgaatcaacccatgtcacatgacctcagattatattttagctctttcaaattaaaaaggataagttaagcatgcagctcttgtacaagtaatgttatcgaatgtttctgaaatttgctgcatcagctcaatgccaaagctgaaacgttcctcaatgctttttcattttttgggtttcttatgcaattgtgagtttaaaaaataaaaatctgtaagaatatgtagcaaggtattttgactgtagaacacctttcatatcatgaacacgaaaacaattgtatattttgaccctcggtgaaaactggccactctttcctttatttgcattgttgttacttcagaagttgaaactgttgttcaatcgaataactgttaacttggctctatagtttatacttgccttaaacctgctctcaagttcttcccatgacttaatttggctctaaaaatcttctataaaaacaagacgaattctagcatatgaaaattaaacatcttttgtattataagaaagttaattttgaaccgttagatgtattaattttgaaccgttagatgtattaattttgaaatcaatgattaatatttttttctttttctcctttttgtttctctttcccaatttgtcttttttctctccggcacctttctctctccgtcatcccttctttgcggtgatggaagagtttagtgtccaaaacggtaccgcttgcgacgacttttttgtgaacgacctccttaacttgtcacatgtcgaagaagaacccgaacaacaacaatcactgcttgtgtctcccttaaccaagaaaacccaagccacgaactctgtactttcaaacacgattatgtctttgtgcccactagcgagcttagagtcctggtacctttatttcactcaatttgtattttaattttgctggattattcttctgtgttgatgaagaaggtttcgatttttacacaggcggatgacgtggtgaacttggagtggtttcatttgttgctctccaaaacggtgtcgttccgagaggtagatgaagcagaagcagcagaagacatggagaacgcggtgggaggcttgggaaggcgaagccgaaacggagaagaagaagcaacagcaacagcaaaaggcgaagaacaagatgacgtcatagaagagttcgaaggtttgagattcgatagagagagggagagggattctggcgaagaagagatgatggaagacagaagagggaagaagaaggcgagaacactggcgagagagaagggtaaattgggaaagagaaacaaaaaggagaaaaagaaaaaaaagaaaaaaatattaaccattgattttaaaattaacacatataacggtttaaaattaactgtcgtatcatacgaaagatgtttaactttcgtatgctagaatccgtctaaaaacaaatgtaagagttgtaaggttaatttaatagttaaagggagagagaagtagtggattcgactttcttactaacactgactactgataaaaaaatagactaacaaattttagagagaggaagagaaatgttatttgttaaggagattagctttgggacatttccggttgacatggacaaatggaagttggacgcatgttgtgttgtaggtgaacttggtcagttgaaaggtattatagaaattaagttgactcttcaaaaaagttgtgaatcttgttttgacccccaaagtttaaaagcgtattgtaaatgactcggtatataaaaatgctacaaatttcaaattaacaaaggtaaagttaaaaacatagaataagccgattaaaattgaaactgcagattacatattgtcaattttgcaaaaaggtattttgttgtgtgtttttatcattgccttgggttagaatatatacatatgtatatctctaagttaattcctacaaatattcttaaatatatactgacagaattgttgatattatcaatcagtaatacacgtaaactaccttaacattcaatcctaaaatcatgaaaaaattatgtacaaccaattattagcctaattatcataaacaaatatttgagctaatgttaataatctccgtacagcactgcgcattttttcaatagcttctttcgtaccaccttatcacaccatcacttttgtcttcccaagggtcccttcaaaccacggcttgaaacaccatctattaaaaaaaaatactagttcactgtaacctttcaccatttatagtacaaggttacagatagcacatcttgaaagggggcatggaccaatgccaagaactaattgccatgcaatgttggtgttatggaagaaagagttgggcctaagttaaggctcaattataattgaagtgtcatttatccaagtctcagaacgtggatttgactcagtccataagggtagttggcaacgtgcagattgaagccggaaatctcggaagcagttcctaggataactgcaaggtaatatgcctataaatacttgttattggcagcagtaaggtaggcgcattctaactttctctctttcaattacacagagcacacaccccacgtcaattggtgtacctctgtgatcatctgcttcgaggtatcattctccattgatatccttgaagttgcagagttagagcgatcaaacagcaaccacacagtacatttgtgctgtacatttgtgttctggaaacagacagaacattggcgccgtctgtgtggacgataaaactcgaatcccatgatctagcaatggtgaatacgagaaacagccaatctattccacgttcagagatgccgaaccgagaaatgctcataccgaagaatcggaatgtggcactgcgagaacatgtgcatatcacagaagccgtttctgacgcctcttcttctccagcccagactgatcaacgaagggatgctccgccgagacgaatggtgcaggaggaggagttaggagggcagtttgttagtaatgcactcaattcgattttgagtcggactgagagcatggagagaagacagactcttcagagacaggaggatatctgaagcattacacgtcagatggaggaacgaaacgaggaatggagacgtgccgagatgcagcgaatggcacagttggaacagaaaatacaaataatagtggagcgggcacatccgaatcatgaggaggacacaccaccctcaatacaagatttgaggatgcatttaaaccaattgagaagtgtggagccggagggagatcaggcgcaaaaggaagaccggtctctggaccaagcccgagtatgtgggggcaacaggaacaaaatcccgcctagccgagtagacgaccaggagggtccgcatatacgagtagaaactgatgtaaacctcacacgccggatagatgataaaacgggcaagtcggcttcgcgtgggaaggaaggacccatttatcgccggaaatacagccggggtcaacagaacaacagtccatttgtggatgaaattgtgaatgctcgatatctagacgactttgatgggttatttctgtcaaaatatgatgggacacaggatccccaagtgcacattgatgagttcgacttacagatgtgtgtccggagcattgatgagcccattatctcaagaatttttgtcactacattgacgggtccggcgcagatgtggtttcataccttgccaccaaggtcaattagaaatttcgaagactttggacaaaaattcttattaaactttgcaactagcaagaagcagccgaagtccgagtttactctgggtaaggtcagacagttacccggcgagacactatagagctacctagatagattcaaagaggctgcattgcaggtgcacgggttggaggagaaagtacacgtatacctgatatctgccggattggatggttcgtcgagattcgccaagtccatttataaagatccggtgaaatccctcatggaatttcgtgcccgcgcaaagaagtatctagaactggagcaaatggaggtagctaacaatccaggacgtgagaaggaacgacgagatagaagaagtccgcccccaaaaaacagggggcattcagaaaatcgtactcgaaataatgatacaaaattcaagccggggagatatgaaaataaatacgacaagtacaccccgctaaacgtatcccgatcatagatttggaaggaggtagcgcttacggagatgaagaaggtagaacggcctcgtcctatttttaacaagatgggactcgacaaatcgcggttttgtgaatttcacgatggacccggccacaccaccgaccagtgttgggatctacgggatgctatcgagaagtttatccgagaaggaagattaagacaatatgtgatcaaaacacagggaagaaagaataaacgtaaggaagaagagaccaaactcgacaagaaggacaaaacaaagaaaccacgagaagaggacgatgcgttcccggaacccgagtttgaatgtaatgtaatttcgggggccatgggaggcgggggcgacactgccaatcaaagaaagaaatacttgaaggaggtgttgtcaatccgagcacagccaaagttcaagaaccatgctgacgaccaggaacctccactcctgtacttcacaaagcgggatatggagggtgttgttcctggacatgaggatggtttggtcatcacagggacggttggcaattgtcgggtacgaaagatgttcatagataatggaagttccgccgatataattctttggagcgcattcaagaagatgaacttagatgttgaagatttgaaaccatgtaaaaccatgttaattggtttcaatggtggaaatacgaatgtcaagggatccgtctctttacggttgactctgggtacgaaggaagctttcaagtcggaaagggtcaagtttgtggtagccgacttcccatcccagtataatatgatattgggaagaccaactattcatcaatgggacatcctgatgtccacgaagcatcagaagctcaaatttgtaggtggaaacggacaggtggtgacaatacgtggcgaccaaaaagactctcggcagtgttattatgacacagtttgggaaagtgaaaataggtcactaccagcacctcgggatccgagtagaattcagagaattcgggaagtcaatgataactggacgcaatcggtaaacttagtagagcttgatatgcgagaagcacaagacgaatggaggccggaaccagtagaagaggtggagcagatccagataggagaacaagcgggccacactaccaatattggaagaacaatggagcccagccacaaggcaacgctggttcagtgtttaaagaaaaaccgcgatgtcttcgcgtggaaggcatcggagatagtcggaatagatcctgatttctgttgccacaagctatccatatatccgggatctaaaccagtggaacaaaagaagtggaagttaggacccgagagaacacaggcattgtgggctcatattgaagaactattacaagccgggttcatacgggaagtacaatataccacttggctctcaaatgtggtgatggtccgcaaatcaaatgggaaatggagagtatgcaaggactacacagatttgaataagacatgtccaaaggatgcatatcccatgccaaacatagaccagttagtagacaattcatccggatacaaaattttgtcctttatggacgcatttttcggatacaatcagatcgcaatgcacccagaggatcaggagaaaacggcatttatcggcgacaaggcaaactactgttacaatgtaatgccgttcgggctaaagaatgcgggggccacatatcagaggatgatgaatagcgtgtttgaaccgtagctcggaagcaacattgaagtttacatcgacgacatgatagtcaaaactatagaaatcaacaagcatgttgaagatctcgaagaaacgtttagccggttgcggaaatataacatccgactaaaccccttgaagtgttcctttggagtcggagctggtaaattcttgggttttatgctgacgagcagagggatagaagccaacccagataagtgtcgtgccgtgttggacatgcgcttcccgactaataagaaggaaatacaacagctgacagggaggatagccgcactgacgcgtttcatgccgaagtcagcagaaaaagctctcccattctttaagatgttgaagaaacaagcggtaatacagtggaactcgaaatgcgaagcagcattcaccgacatgaagagatctttagcaagtccaccagttttatcgaggccggaaacaagagaaatattagtgatatacttgtcagtaggtgaggaggccgttagtgcagtgctagtacgagaagttgagaagacacagaaatcaatgtattttgtaagtcgggccttacgcgattccgaattacggtatcagaagttagaaaaattagtgtttgcattgatcgtagcggccaagaaattacgtcattatttccaaagtcacaccattataatccgaacagactagcctatccgacaagtgcttcacaagccagatttggccggaagaatgacgaattgggcagtccaattgtctgagttcgacttaaagttcgaagcccgtcatgcaattaaatcccaggcattagcagactttgtgcgagaactaactcctagtgccctaagaacaggaacttggtggactttgtacgtggacggatcctccaacaaaaagggaaagtggagccggaatcataattgaaaatctagatggagtagcaacagaattctcattagttctaaattttccgacgtcaaacaatcaagccgagtacgaggcattgatcgccggattaagacaagcaagggagcaggaagcagatagagtaaaagtgtacacggattctcagttggtcgcaacacaaatcgaaggccgctatcaggtgaaaagacccttattagcaaaatacttgggccaagtaaaagaaattagtgctgaattcgatgaggtgacggttaaccatattccaagagaagataacgccagggccgacatcctgtcaaaattagcgagtacgaagagccccggaaataatcgaactatggtccaacagcaaatattgcagccttcgtgtataatgatgatcactgcagatcatgattggaggcgtccaatagctgattacttgtaaaaaggcacattaccagatgacggacttgaagccaggaaattgatgagaacggcgactatgttcacaatggtcgacggcgagctgtacaggaaagggttacacagccctttactggtttgcgtaaatccggacaaaatcaaatatgtcttgtccgaaatacatgaaggtatcaacggacaacacatgggggcaagggccttggcaaggaaagcactccgagctggatattactggccgacgatggaagcagatgcagccgaacatgtaaagagatgtgaaaactgtcagatgcacgcatctcgaattttgtcgccacctgaagcgctgcaatccatctcagcaccatggccattcttcaaatggggcatggatttgttgggaccgttcaagccatcagagggacaaatgaagtagctgatagtcgcggtggattacttcatcaagtggatagaggtggcaccgctggccacaatcacatctgctcgggtccaacgattttttgaacggaacataatttccagatttggaattcccggggaggtcgtcactgataatggaacacagttcacagataaaacgttccaagagatgatggccggcttccaaatccgacacagatttgcgtcggttgagcatccccaatccaatggacaaacggaggccgcaaataagatgattctagaagctctacgaaaaaggatgtatgacgccagatctgattgggtggagcagctatactatgcgctatggggtgttcgaaccactgtccaatcgtcaacgggtgagactccgttccggatgacttacagaagcgaagcaatgataccggtcgaggtcggacaatcatcgtggcaccgagctcaggtacttcgagaaggggaggaactcaatagcaaagctctggcactggaatcggcattaatcgacgaaatccggatagcggctcatgcccgagaccttcaagcaaagcagcgaatggcacgtgtttacaaccagaaggtaataccgcaacagttcgagttggccgagttagtcctacgacgagctaatgtcgggaataagaacgcccgagacgaaaaattcgcagctaattgggaaggcctgtaccggataactcacaagctcgacaaaggggcatatgtgttggaaacgttggaggggaaaccaatcaagcggacctggaatgcgaacaagcttagaagatattacagctaaaaatatgtggcaaacaggggatttctcttttacagagagtatgaacttgcgataatctacccaagttcatatggttctctgtcattgaggtcgcacaaacaaacagaggcgtgcaggtttttctgttgttaagggtacgaacccggatttatacgttcggatacgtacggtccttgttgacggaaaaagcaccatccggccaagtttaaacccggaaagatatatttctgggctcagttgtttttcttaatcgcttctttcaccattattagttatacagttgtaagtgctttatttacgaaaatatgaccgagaaggacagttctattcggagcatatgattcgtagtaaatgttgtaatatgacggttacaagttcaataaaatgttattcaatatcatggtgttttatatactacaatttatatctctgtaaaacgtgatacgatcagaggtcatggttctttgtaagacatgacccgactagattttaaacggctttgaatgatacgctgaccggttctgatcaaatcgggagaagcagagttattcatagttaaaatctaagtttaagacaataacaagcataatatttggtctttggaaccaaaaggctgcgcgcacacaatattctattaaccgagtagaaacaacttggatgcaaagtaaactgtttcaattgatagcagtattataaaatatatgttccaggaccttgggcctaacatcgacacaaaaaaaaaataaatacaaataaaaccgacattccggcccttcattccttttcgacgggaggttgggtgtcggcgacggatggctgcggatcggagacgggcggctgattatcagcaggagagtcggtagccggtgttataaccatgcatttaaagctttatttttggcttttctgaggttccacgcttggggcgtgggaaacaactcagaaaaccaatttcttctggagtcccacgcttggggcgtgggaacccacgcttggggcgtgagaggtccacgcctggggcgtgggaagcagcccagaagtgcaattttgtctgccaacccacgcttggggcgtgggagcctacgctgggggcgtgggagtcacgtctgggcctataaaaggcccagaagcccgaaaatcatggcattttctctccttcttcttcctccttcgtccagacctccattagaggagtttccgagctttttaggaccctatttgagagtctaaacacctcctttcgacctttgagtgtgagagaaacctatggaagcttgaatccttcgattttccgctcttgaaacccctttctgagtgagaagcgatttctcagaggaaaagctcagagagcttgagattggcgaagacccacggcgtataaaggacacagaagctcaaggaagctgtcctgaggcctttagagtcgccactgaggtaagaaacacaagtttctccgtttgattttgaatctgaggggtttcatgaatagtgacccgtttgtgctggggctagaattagcccagggtccagttgagagatgtgttcagagcgatgaatagatgaaggattagctttcagtttctgttttagatgactttgaattttggctctgtggcttgtatgtgcggcctgtaggatgaatcaattgtgatgcagaggccattccagagcctagattatgtctgttatgagcctgtgaggctagaggaatggtgccttgactgaggtttagatcattccagtggaattgagaatgttgaggctgatgagataatgttatggatatatgtgttttgttttggagtctggaatgactcagacgtttggcattcagcttgagggacctggtaggggtctctatgtagcccagagtgggctgagcctgattaaaccctaggataagggaattatgtgatgatatgttatgtgcttgatgcctgatggctggttttgatatgaacatatatgtgctttgatcaggccgtgagcttgatactgttggtggcgggagccacagaccagggaaagaactgcagagcgaggctttgccaggtaagttcagtgtccctggggattatttcccatctggtttgcataccacactccgggggagtggtggttattccatactgcatgcattggtagtttgcatcctcatgatgatatgattgtgcatctgtgcttgagaatctgtgctatgactgtgattagatctgttggccaaaggatagatatggacctccctaggagatggtttcctcctagtatggttggctcatgggtgatgatgatcccctagaccaagggaatagtagatggcgattcctgttattcttggaggtaccatatacgtgcatccatgctaagggtagcacccaatgggatgacacgggtgtgagtttctggtatcacactgaggatggatgctgatgatgatgcatcctggcgttgatgatgatacgccattgcttgacttgtttggatgcttgatatgttgttatgaggacctgatatgttaggccggtggccatttgtgtgtatgcctaatgtatgtgttatggaagtgggccagggtggaggaaagtcctccaaggaccctgagcttactgagatgtgtatctcacccggtgtggggcttatgatttcaggtgattcttctgggagagaagaacagacacagggcaggagaccctagagatgacatgctgctgaatgggaagcagcaaggagagctgtgagctctttttgactttgtttctgttttgttcccttgatagtgatggggtgtatgtaccctatgacgtgtctagttctgtaaaccccctgtgagggctgatgttattttggatcaccatgacatggtgaaaatctgatgtatatttttgatgaacagaactattgatgtatattatatgattctcctgagcttatgttggatgtttttcagttatctgcctatctgaataagcaatctgtctatatgtatattgtatgagaaaaactggatcagcaggggtatgatatggttttgtatgtgtgtgtgtttgtgatatgctgggtttccatacataatgaatcaggaaaaatcgatgttatgcttccgctaagttttaaatgaatgttttaagcgctaactgatatcataatgataacgcaccggaggcctacggggtgttacagccggggcagcagaggtctcaccggcttgcgcaggctcatcaaccgccgccgcaaaggaagtttcagcctcggtaggaggaacctactggccatcgtcaacataagccatataatgcatcccggcagtagaaagttccactcccgggttcaagtgttgaagttgctcgatagcgttagtgaaaccctcctccgcagcggccgcaagagtaaccttcatagccgcgagtttatcctcataggctcggatttgctcttcgtgattaatttttaaagaggccttctcctgctcggcaacctccagagaaccttgagctcgacccaagtcactccgcaaagaagcagaagcagcttgggatgcgagtaactcttcctttagctgtcgattttctgcagacagttaagcccagaccttctcaaacccggccttggtagaaagaagttcttcataaaccttctttttctcttccacagctacaccatatctgttacgaatacggttagatccataagtaagaacaggagtaaaagctaaaaagtcagcggtgatgataaatacctctcccgcaccgtagcaaatgccctcaccaaaaccggaaggcatattcctcggtgcggaccagctcaaccagttcttcacccacgggggcaccagggttaagcatagaagagggagctttcgtcaatttgactaagtcctcatttactcccttcttccaaacattaactgaaaccgcccgggagtcggaacggccagaatcagcagcaggtccagtacgtcgctgagacgtcggcacagtcagatccacggtcgcaaccccggacgccagggtagatgaagctgggggtcggggaggcgcagtttgaccaggggccgccggcgtactcagcaccaccttagaccttttttcctcaccatccaacatcgttctataggaaggaggagggcgtttgcgcgatttgttcaaaacaggaggctgctcggaggctaaccctttgcccttgtccccgatgtaatatcactaaatttaattaaggtaatttgggtgatatttacgtaattaaacggatttacgaaagggcagtttgatctttgtcggaggtacgagtgtagttagtaaattgctggacgcacccccagtttcttgttaaaagcaacagaacacgttttctgcttgtttcatcttctcttttcttctcctctgattttctctccactcccaagctctcttcttgccacttccacttgattagtggccgaaatcctaaagcaagcaaggaagaaagtcattttccttgttcttggttgtatttgagctttgggtgttggtgatttgaaggaaaaagtggattttgtatctgcccattttcgttcggcgctgcggaaccgtgattggaagccgtagagtgctggtctaccctcctttgtggtgtattgaactctaaggtttgaaatctcctcctattcctctttgattcttgaggttagggttagggtttggagtgagattgatgtatgctgagttttagagggtgaggcagttttgaagtatgatttggagtgggtagaagttgattttaagctgatatgatgttctatgcataaatcatgcatgcttgttcatgacagccaagaacacctattttggcagttttggtgttttgtccatagcaggagctatcggtgtccaaatggtgtaaaactggtgtcatttgaaagctaagagagttaaatttattctggaattttcgtgctatttttggagtctcctagaaattgtggtgcagagttataacaggctattatactctatttttagcagatttttctgctgcagagagccattttgcagaaatcataactttgtctaggatgatccaaatcgagtgatttcagtggctatggaaagataggtatgtgaaattcatgcctgtaaaatatcagctcatttggacgagtaacctggtgtgggttgtcctcgaaagatggctggttgagttggtctgttgctgtcagcactattttggtgcgtgacagttctggtttttggtttgctgcagaggctgtggttcatggtttttgatgaaactagttttgtttaaaagataagagatatatcttgattcctctaaattttagtgattttaggagattcccacaaggatttgtgatttttccaattggatgtaaaatctgcagaattttatgcagcagtttatgtttttccgcatgttttgctagagatttgtgcgttgtacggatagaatgatatttgatatgtgattgtatgccttttaggacgtgagcttgatatctctggtggtggtagccacggtaccggggaagccggtgtgttgcttagagcaggtaagctcttggtccttgttgtatgtcctttgttgtgttccaccatgctccaattgatgggatggtcttaatgtgaatgattgtatgtatgtggaacatgagtgtgaatgtgaatgattacagaattgtgtactgtgccctgtaatggaaattgatgtgtgttgacttgatatgctgaaaatgtgaattgaaccctttgatgagggaatgatatgtattgaatgtatatgcttgggatgtaagctgaactctttgataagggattgatatgtattgaatgtatatgcttgagatataagatgaacccttttatgagggaatgataggtattgaatgtatatgcttgagatgtgaactgaaccctttgatgagggaatgatatgtatggtatgtattggcttgagatgcttgagatacaagctgaatcctatgatgtacgacttatgcttatggttatgagttgtttagcttatgatatgtttaatgaactattggaaatgaatgtgaacactgtgatgtgatattggattgtatgattatgagctgttcagcttgagatgggcgtgattatccattagatggactatgattctggaaatgaatgaatataatcctatggtagtaggatagatgacttgagattgagtaagacctgcagtgagatgtccctgtgatatagatgtagcctcccgagtggagatgttcctatatgcacagatgtagcctcctcaggcaattgggttgagataggaaacgagatgtgcctgtgatatagatgtaacctctggaatagagatgttcctttatacacagatgtagcctcgttagaaggagatgtgcctattatatatatagatgtagcctcttgattgagatgttcctatatatacacagatgaagcctccgttagacacatgagatgttcctgttatatagatgtagcctcctcaagtggagatgttcctatatatacagatgtagcctcatgtagatgattgaatccttgcatgagatgtccctagtatatagatgtagcctcctgagaggagatgttcctatatatctagatgtagcgtctacaggatagagttggatgtgatgtttagtggtatgccatgagtatagcctgattgtagtcaggtagtggtttatagcctgattgtggttaggtagtgatttatgctatgaacggttgtagaccgtgcttgaggcacctggttgtggccaggtggatgagaattgagattgatggccgcttgatgatatgatggttgagattatgattttgaatatcttggatatgttgtacctatttatatgttggaaagtgaaccaggggaagaaaatacctttaagagccctgagtttactgagattttatatctcaccccgtgtgtggggcttatgttttgcaggtgaatcatcaggcggagcagatagatcccaaggcaagaagcctatgcagggatagcttggatttgtaaccttaggctagatgacatgagcttgtgactcatatgttttgtattatgcctttggttttattttgtaccctgaggggagtttatgtacagttttgtatgagacacagacacttgatgtatattcaccatgtcaaatgtacagtgtatatgatgatggcatttgttgatgccctgcatatgttattgtatgcttccaaactgcttaactctgatgattatcgttaatgattgtaattaaggctgagtaatgacctcggttgtagctggggcgttacacccggtgaccttagggttgggagcaacatccgacttggctttggtaggacgagctggttgtgttcccatgttagctgcaatgaaaaagaaaacattagaaaagttacacggcattcttgatataattaaagaattagtatagtcgccaaggcaaaccggttcgagggccaccgctaatatagttggctatgttaggctgaccatgggcgtctacatatttagaaattacaaaaacggacgaagcatcggagtcacataattcctcctcggtgaatcgataatttgaccgatcatgcttataatgatcctcagaccaatagagaggaaatgcccattccacgtcggaggattcggggccggacaggaagaatggttgccgaccaggctcgacgaccactttaaagtacttatccttaaaacccctaaaagagtctgtaaacggtttaaataatttccgtttgctttgacttcgaaaggagatccaccctttccggttaggaggttccctacccgtcctaggagtatgaggaaagaaatagtagaagaagagggggacagtacaggaaatccccaagtcttcacaaaacaattcaaaagtatagataaagccccaactgtttgggtgaagctgagaaggggctacccggagatgagttaagacttcgacctcgaaggaagagaagggaaaagtgatgcctatttgagtaatcacgtcctggtaaaagaagaaaaaattgggatcgttcccttcccgttgggcacagacaggttcacccaagaggggagcccggataacaaacccatcttgttttcccaccggggtggatactatactcggaaggtcaagggtggacagggttcgaaggacttcgtaagtcacccaagtaaatttggatgccagagccggagtcacttctgactgggacttagcagagatggagtcgtgtacagtttccaaagcaacatccattacacctacgaaacgaaagagaaaaacaaagattagtaaacgtacctggaggcaatgcttcaaatatagaagaagtcgaggtcgggacctcgtcgccgccaacgcgggtgcgcggctttggcgggggttttttggtggaagatagtatggggttatgccgacacgaccccaagattgaatcagcgacgtcatcagagccgagttgagtataatacagggcgtcgaaaacccagtcaatacaagcatcgtacttgacctccaatacctcatccgacgacgaagaagaggtctcatccgaagaagatagatcagtcaaggggttaaaacgatgacatgggagtggaagttcccttggactgttagtgtgtttgggcccagaaatttgggggcccaggatggatgaagttctagaagggcccggggccgaaacaggtttgggcatagaaccggcggagtttgatggaggaggaagaggagcaccgacgagtttggacccacctgagggctacgacggtaaagggaggttttggccactaggtgtggcggaaacctttgattttttagaggaagaatcgccactataaccacgaaggaggcctttttcaagttcctcctccggaagggggaggccaaaaaccaaccacccagtcctggggggaacggtcctccgcaattcagcctcttcctcaggagtcatcttcatgctttcgaagtaaataaaacaatccaacgaaaagaagaaacccaaaatgaagaacaaaacgaagaagaaaacaaaacttagaagagatgaaggaaataatgtggtccaaattaaagtatcaaatatgaaactaagaaaacagaaattggaaaggagaaggagagtacctgttgaaggaagaggtcgagaactggaagagaagaatacgaaaaagtttctgaggaagacttgatgaaacaagggagaaaatgcgaaagtatcagtgaagtgacaaatgaacgaaaggggggaagaagaaataatcagaggtgcgggattttaggaggaaatttgaaatttggggtaacttgcagtaatcgccgaaagaaataaaacggcctgtgaaaccgtcaccaatgaaacgaaacgacagaagggcataatggtaaagatcctccggattctgagggcatgaaagtaaaagcactacaaatgcaataattaccagaaggatgaaacaacaggacttttaatgcattaattaacaataaaggcaggaaaagtaaccgacggcaatcagaaagccaatcgtcagcaaggacatctcacttctccggataagtgctttacacgttacatgattcggacaaatttactcgggactcgtgactgtacattcgtggtcggctacctgtagtcgaaaagtcctgtccgaaaaattatagtcgacaaagtgatataggaaccttcctcaacggttaaattgttctacccgaaccgacatatacggatacaacctacctgggaaaacatagaggaaacgacacatcccgatcaccaaggatactttatgaccgggctgggggacaactgttatggaagaaagagttgggcctaagttaaggcccaattataattgaagtgtcatttatccaagtctcagaacgtggatttgactcagtccataagggtagttggcaacgtgcagattgaggccggaaatctcggaagcagttcctaggataactgcaaggtaatatgcctataaatacttgtcattgacagcagtaaggtaggcgcattctaactttctctctttcaattacacagagcacacaccccacgtcaattggtgtacctctgtgatcatctgcttcgaggtatcattctccattgatatccttgaagttgtagagttagagcgatcaaacagcaaccacacagtacatttgtgttgtacatttgtgttctggaaacagacaaaacagttggtaatatacctagactttaggatgacaaaatagaaggtgatttattttttttttttgggtgaaaagacacgaagaatggtacatccatgagttaagtcttgcaaaattagtgcatctcattcaaaattatcgtgcactaatagatgaagacaaagcatgcgctaagatagatgatggtgatgtatttgatgatcttaggctagctgtttgtacgtatgaatctagtgacgtttgtgttaatggtatgaatcggttcttttcactgtttaacacaatgtatgagcaaaacaagtggttaattaaggagctcaaatatgagctcaacttcaactcaggttactcagcttaagaaacagtttatcaaactaactaatgagttaaatttcttgagttgatttcgattaatggccaaccttactaatggaaataatggtattgatacataatgtgatggagaaggaggttttgagaaagtaattttatatttgagtttaatttgcaactttaatatagttttaactcgattgggttgttaatatgaaattcaaacttaaggtttaaacatgattgaggtaaggacagtttgtaatctacagtttatttgtcgagtatatggaaggtaattaaaatgagatctgcacaaaaattttagagtgttaacttctaaaacacacgcaatggtttaaaataaaagtcaagcccttaccaaaaaaaagtcaataactttatatgacatcttataattttaatcaacaagtaacaaattttatttttaatgaaaattgttttctatttatctattattttaaaatcacattaattactatattttgaattatatccttgtagaataaaaagaaaaatattgtataaaatgttaaagtgaaaaataagagggatataatatttattatgaaatttttggtgttcatgaaggcattcctcaatcagaagctaatgactaatcatccagatactaagattcatttaaggagttgacatatctcgatagatattttttcatacatgaatcnnnnnnnnnnnnnnnnnnnnnnnnnnnnnnnnnnnnnnnnnnnnnnnnnnnnnnnnnnnnnnnnnnnnnnnnnnnnnnnnnnnnnnnnatcacatacttaagaaacaagattacctatcaaccatgtcacattatattgatatttatgaagagattaaaaatatttagttaaaataatttttgtcctcttattttttcaaatccataattttagtccctctattttttagttgaaacattttgtcctccacttttaaagaatctattattttagtccccctttatcaatttcaaacatagctatgtacttttttaatcttttttttttatataaattaagctcattacaaatgaaataattagaaaaatatttgttatatgaaaaataaatagatgtgtcagttaacttttacaaagtatataggtcaatgtttgaaattggttacaatgattaaaattgtaaattttttaaaagtggagacgaaatatctcaattagaaaataaggaactaaaattatgaatttttcaaaagtgacggataaaatgtctcaattaaaaataagaggactaaaattgcaaatttgagaaaatagggagacaaaaattgtattttagcctaaatattttannnnnnnnnnnnnnnnnnnnnnnnnnnnnnnnnnnnnnnnnnnnnnnnnnnnnnnnnnnnnnnnnnnnnnnnnnnnnnnnnnnnnnnnnnnnnnnnnnnnnnnnnnnnnnnnnattcgtgattttagtctctctattttttaattgagacatttgatcccttactttttgaaaatttgcaattttagtccctttattttttaattgagacattttgtcccccactttttaaaaaatatgtgattttagttccttttttcaatttcatatttgactatatacttttcaaatatttttaataaattaagtttnnnnnnnnnnnnnnnnnnnnnnnnnnnnnnnnnnnnnnnnnnnnnnnnaaaatatttgtgacgtggatagtagatagacaagtataaatcaacatttataaaaaacataaatctaacatttgaaattgagcacattttttttaaaataacaaataaaatgtctcaattaaaaaataaaggactaaatcacagatttgagaaaattagagaaaggaaaaaatgcattttaaccttattttttttgttaatttgtgtattataatcttaatctcgaataaaagaaatggatggaataatggataaaggtgattattatgaaatccttgagcatgattgcacattaaagttgatatttaatttatatatatatatatatatatatttttaaaaaaaaactatatccattcaataaacgcagttcctaaatccgtattttttttcctgaaaggaaactattttaatctaatttttgacggcctcctaaaacgtcaagcaagcccctatagctcagtggtagagcgtcagtcttgtaaactgaaggtctgtagttcgatcctgcatgggggcaattatatactttttatctaactctgatgtccaattcaaattttcaataactttcctcctaaagtgattaagtccattaccaagcaatgaaaaaaaaatggtaggaaataaaagaagttggtgcttttttcttttcttttctttttttatgagaagactcctcatttaaggattaatttatcacatatttgtacttgtgtactaaattaacaattaaatagactatttatacacaccttttagttgtttttgctacattttaacataaaaaagtgagacatgaatcccaaatgctatttcaaacacacactaactcataattaagccttacttattatagattatttataaataaatgaaataaaaaagttattcaaaagtcataattagggatttcgcgggtcggtttggaccaattttggtcaaatttaagacctaactcaatcaaatttgatcggctcgattcgatttaattttcaaggaaaaaaaatgaaactcaatccaactcaacccatttatgaacaatttggttttggttcgggccaataggttatccatttaaatttgaccttttttttatcttaaaacgattattttatatcatgattcatccaaatattcaatacaattaacaatataaggtaaataaccatttttgtccttgaatgtgtagagacctaacaaattcgttcccggaagatgaaaattcaaattttagtcctcaaaagggaaaaaagtgtgacaaattcattaatccgttaactttcgtatgttaccgttaatgaaagagtctactttgtacaaagggacgaaaatgttacaaaaattattgtcaacatgactgcaaaatagattggatcaaaatgttaagtaaattttcatttgaccaaaatgtcagtaaatttccattagacaaatttgtcatatcccaaatttcgtttcatttaaggataaattgtaatttaggataaatagtcattttcgtccctaaacatgtagagcactgacaaattcattctaagagatgaaaattcaaattttagtatatacatttttacacgcattgcaaatttgttataactatttgtttgtcttctcagctaccgagatcattgacacattgttggaacataatagtattataggatattcatgagttttctctatctctctacatatcattttctcgggttctttttcacactgtaaaagttgtcacaaatttgttgtttaccaaaatcacatcatttactcgttctgtattaccaaactccccaataacattcaaaatgcctaaagaagttgaagcaacatttaaggttgtcagactaacattgatttttgaagtgtgattttgatcgaagatgtgatttattctgttctattatattatttttctatatgttggagttattattatcaacattgatatgattttgtatcccttttgtttagtgggttttgaaaattcttatgtaacaccccctcaatcatcagggtcattaccaaccataaacagccaacacacatataattatcagagtttaagcagtttggaagcataactaaaaagtgacatcatcaaaggtcactatcataaacactgtacatataatatggtgaatatacataaaatctgtgtttaagtacaaaactgtacaaatacatcccctcagggtacaacaaaactaaaccaaaggcagaatacaaaatatcagagccacacgctccagtcatctatgcataaggtttcaaaacacagctatccctgcacaggcttcttgccttgggatctatcagctcctcctgaggattcacctgcaaaacataagccccacacaaggggtgagatataaaatcccagtaaactcagggcccttgaaggtatttccttcccttggttcactgactatacatatatatatatatatatatatatatatacacagcacttaaccatagtggtcaatcatttatctatcatcaatcatcctcaatacacattcatctaccaaaatcaggtataatcatggcatacaaccatttatcatattcataactgtcatgcagaggctacatctaggtatataggaacatctccacccagggaggctacctctatatactacgaacatctcctgcctgtatatacctatcggaggcttcttctgtatatatataggaacatctcaatcacgaggcttcatctatatatatcaggcacatctccatctgatgaggctacctctgtgtatataggtacatctctactccgaggcttcatctatatatcacaagaacatctcatcctctatcacattacaattgcctgaggaggctacctctgtgtatatgggaacatctccctgcaggaggctacctccatatcacaggcacatctctcaccaggtctttctcactctcaagtcatctatcctactgccataggatactaatcaagcacaacatgcatattcaagtttcatattcaacaaggcatgctacaaatcaagcaactcacatcaatttccctttcacagggatcaagtcatcattcaacagttactatacaacatccatacacatgcatacacgcatatcagaaccatcaccccatttggtggatggtggaacacaacaaaggatacacaaacaagaaccaagagcttacctgctctagacagatcaccggctctcccggcctcgtggtcaatgccaccagagctatcaagctcacgtcctacataagaacaagcacataactcatcaagtacggtcctaagccgttagaacgaaaggaaactataatcctttctacaaacatataataaatcacttcacaagtgattctcagaccctcacaaggatcctactcagcctacacaaggctccagagcctcaactaagactctgatcaggctaatatcaagcatatccctgctttagccttctcaatatcaaacttctcattaacatcaatatcaacttacaaacagcatctatactgtctcaggaacaactttatcaactgctctaaggttcatactagtcatatcactagccttttatctctgctcatacatactcagaaccaaaatcaaacttcatcaataatgatgattcaaggctctaacttccttagaacaaccctctgagcataaaactctacagagtctaagcctaataacggctctaacatctccaaaaacacctctcaaggtattcaaaaccaaccaaaaacccaaacacagaatcaacggctaaagctcgagtttcttacctctgtgtagtccagacacaccagagaatcactttccctagggtagatcgctcaaacaaagcttccctcgcctctgattcttcgattccaagggctcccttagaaatctcgatctcgccgtttactgcctcttgtcgagaataaagccgggtcactagcttatctcgaggctctgaacactttctcaattgggtcaaaggtgtttagatgagaaatggagaaaatatgaagctccaaggtccatcaatggcttccccctctctcttcctctcttttctctctgattttcgtccaaatgggctatttataaaactgacccgaaggtcccgcgcggttcgcgccagatgccgcgctgattgcgccatggttcgtataacccgcgccattagcgccacatccacgcggttagcgtggaatggccgcaagtattggcctgtttcagaccttccacgcggatcgcgccgtaccccacgctgatcgcgccacaagttcgaattacacacgcgattagcgccatgcccacgttaatagcgccagaaggccgcaaggattgcccttgtttaatcctttcgcgcggttagcgccagaccccacgcgggtcgcgccacttgttcgaatctgtttttcaactctttctctcaagcttttcatttaaggattgtaatgcttgattctaactcataatcatagcttaatctaggcttaatcacatacttaaaattcaaggtattacatcttatgtgttagacccagtcttgtttgagagagaagttgacacttgagaacgttatatatgcacttaattggttgttgtcgtttgagttggtaagatcattttttaaaagaaactttctcaattataggttagaacaaaatcaagcgtgatgatgttgaattacatgttagaacaaaatcaagtgtgttggtcatggaagaattaaattatattttacatgttagaacaaaaaaaaaggaaagatgaagattaaactatattttatccttaaatgaaacaaaatttgggatctgacaaattagtcaaatggaaatttactaacattttggtctaatttattcaacaaccatgttagcaatcatttttgtgacattttcgtctctctgtaccacgtatgctctttcattaacggtaatagatgaatgaattatcgcattttttttactttcgcggactaaaatttgaattttcatacttcatggacgaattttttagtgctctacacatttaggggtaaaaatgactatttaccctaacacaatgttatcaaatgtctgaaagtagtaaaattgattcatttaataccatcaacataatattataaaataaactaaaacaaattaaaacaaaatattcttcaataagatttactataatagtatgaatcacaactattttctacagactaatttcttgcaataagcttcggtgtaaccagatttgttacaaccagatttgctgaaacaaatgaacaaaatattatccattaatattataaacatttccggttccaatatttggagtctcaatattagcagtatttaaagtcaaatcaaacaattctaattttttttatcggttcagttcggttttgattgaatctataaatctaaattcataacctgacccgtacataaacgattttgatcaattcgattcaattttgatctaaatatataaatgaccaaccaaaactattcggatcgatttgggacaattcgaattaacgagttatccatactcatgaatacccctaatcataaccccattccttcctattagtcaaacttcgtaatagctcatttagctggatacgggcaaacttttacacgatacatattaaataacataaacatttaaattagtcattgaagataaactggacatcacgtataagcaaggttacatactcgcattcctctaagcattcaagtgtaaattccagtggttctaacatgcatttggtgactttgcacggaagacattgattttttttgtagcctataattctctggacctgaaagtggtaggttttcttaaatacatgtgaatgctacagaaaaaaaaaaaaaaaagaaggaaactaggataggagactgaaactgaaaatttcaaaaataatgtagtgagcaaccctttagagtcgtggcagaagatcttgcctttggtttttgattgttgtctctctctcgacccacgtctgtgtgatttgttatacttttgatcatggaaatgactgtaaatcaaaaggcaaaaagcaaaaagcaatagaacaaaaacattatttagaaaagaaaaaaaaacaaacactatattgagtgcaagtggcgtgtaagttaaaataacgtacgacaaatcatgcattatttgtccatgggccatcggtattaccttattatttattcaaaagatacagttgagtagtccattctaattgaaattatatatttttaaaattttgttgcaatgtttcttataaaaaaatataaaatcgataggtaacatatcagacttcgatattttcaacactctttaacctcttttcaacgtttccttttctctttaaattttctttatttcctcatcacttaccttcttttttctccattttctctctttttactttttttttcggttgcaggagggcaggagagaatctaattttgtgacatatctttgaaaagtattgaatgggtagagaaatatcatgtatgattgcatttgatcaatggttgtgctaagagagctaaggttgcccaactcttagtaattttgggaagataattgtacacaaagttttcgttccatacttgggagaggggatggagtcttgtatttgtagttaactttgagatgtgacaattactaactttgttgaattggtggttatccgtagctaaatcttgacatgaaatataagaaattattggatgtttgtagtttttttgaggatcaatgattttggagttgtctgattatcttttcaacgaacttggtgtgacaagacacaattgacgtgatgagagaaagatataggtattcttgaaaggacattatctcatgaacgcaattagtattattctcaaagggtatttaagcaccctattttatttatccatacttcctaggttaatatggaccacaaccatatgtataatgtaaaagatacacttcatattttctcacctcaccatcaaatcacaggatatcaactaatctcactagtcccataaaggggccattacataatcaggggctttcccctttaggtaggtatcttttcttaatatacacactcaactataacttacttgagtgttataatgtttaaaggtgatcatcagtcatttgttagacaaccatggaactctaaatcaccaaggaacatacacccaattgggatatgtaagtctctaacctggaatattcatcttgaacaaccttttctcataatacatgtccaattgaaatatgtaagtgaattgaaaaacattcatgatctctaatctatgacaaaaaaatgtaaaatgatattttaacattttacaaatgaggtgaatgttgatcatacacacataagaaacgcatgctttcagtgagttacaaatattcaaatattgaagtagtttaatcggcttaacaatatcaattgtgaaagttgtgcacgcactttggagcaaccaccatatttccatcgaaatacttaactcctgccaaacattatttggaagatgcaaaaatcctgctaacaaacaaaaacaaataaaacaacaaaagaggaatgatatccttctttttcctcttttgtacattgctagacatgtcgtatttacaagtttcttccatccttaaacaagagacgttttattccctcaaaaatatattatgtacatttatttacttttgctctaactacaaatagtgtcagtacagtttataccatttcaagcaaatgcaattaccaaatgagtagttacccatagccaggcatcaacctgtttgaactatcagaagctctttttcctgatacaacagtcatgttttttttttttttctgagggcaattagaagggatggaactctaataacctttatccacatcaccccatcactttctcataagtgccaaggaattaattgttgaaccattgcagccataacatgtccactgccagacataacagccaatcattgcaccaaaatctatcataccttccggtattgtctagggaaattgctgatgtttcaaacaggtttatcataaagtatctactcaagtcagatatgtgaacaacttcataatttggaccgaccgatgcgtttagtacccctgaatagtgaatgccttggagctggagtacatgacctcccatttagattcccagaagatttcacatcccaaccctcaacattcttcggaacacaaacgtcgaaaagaaattggccaaggacactatgagcgctgatgcttgggaagctaggtacacaaacaggtttttctttttgttcgccttgcggagccccagattctctatcactgtaatgtcctgctgaactaggcaaaaagaagtggtcggttggcccgactgcaactcttctaaggctcttatttgaattgattgccaccttctgcaggttacagattaactcagatatctcatcctgtgtaccatccataccagttctttctctttcaagcaacattttttgtgaatatattgaagaagccttctctaataaatggctcacagcagctctatattgaattggatggtgtttgtaatgacctggaacaaattaataattataacaatatcaggttaaactggttcaaggttgtcacaatgtagttgaaatatagtctcggacgaaccaaggtgagaggagctactgaaatttacaaggttgacatcaccattgagattgcgtagtcgttgagcaaattcatagatactttggtatcgcacaaggtcatcattctcagaacataaaatgagaaatggagctccaaaattctaaagacaaaaatgaaatcagagtttaaaataacaaaactaaaaattactaaagattccaggtggtaagatagaactcacaacagaagaatataaagcccgccaatgctcagcagcttgggattcaaatctagttaggtacaaagcatccaaaccagaggtaacagattttgctacccaagaaacaagttttgatggtccaggcacttttacaatggaggggtgtagtgtgaagcggaagccaaaatcacttgtaacatctattggaccagaatcatatatgtgtccagaaagacagttcctaagtaattgatagttaggctacaagaaataatcagtaattaataaatttcatgatcacaaagcacaagacatcatcaatcaacaaagagagaaaggatcaaataaagatgaaatctttttttttatataaaaaaactataaaggaaaaagtgaattaccaagttgagcggagtttcacatcttccatcaataagctgcatttatatggaaagctattacaatgggcacttctactttaaaaggacacacaaaaacttcaaattctaatattctccatatcaaacacgagattggatgcctagaattacctgaaataccctgtatagacatgcttttgacccagcagaaaaagcagcaaatacaacaggacatgacctagttcttagctcctgcataatccaaacgattttttttgcttagcacctatgctatgactatgacataaactatgagatttgtagcatggtattattaagatattttgtaaattgacatttaagagcgtcaatataaatcttagcatgctattcaatttctaaaactaacctcaataagttcatcaagaacacaaaatgtcaatggcatggcactttcatcattgaaactgcacgagaggaaatatatgatataaaaattccatcagtactatgcaccaaccaattagttgaagagtataaattaaatatggtggtaatccatgaccaacaaaatgcaaatacaaaatagtatacctcgacagatatttagttggttacaacttgagcatgtcacttaagtttttggcagcaaaggatttaggccatgttaagataaactttttattataggagaagaaaataaaaaggtaaaatgaattgaacttctccaataagctaaaatcaacttatgctcttaagtttttggaaagttaaatgagagaacttctatagaagttaagtgcataagctgattttagcttctggaagaagctcaatccttttaccttcttattttctactcctataagtacttacagagaaattgatccaaatagggtcttaagataataatacaatgccaaaccacatacaaatgcatttaatatattgtcactggatatagaaatttcattaatctaacaggaagtacaacttcctttttcctttttcaatgcttgaaaatctatttgaaattcgttgcagtacacttcaaccagaattaaacgcttcccaacacgtagtagagaaatatatattccccacgagtattcaatatttccctatgcatcaaaaagggagcacaaaccttcctaaagaattgcggataaatccatagctgtctcacaagattcaacataaaattatggtgtgaatcaagtaagtaaaccataattaaacctctccaaccaaacaattttcttaatttaaaagctagatatacattacctcctaccagttttgggaatatctcttttattctattcttagcacatggtcccctctaattcaagttgacaaagcaagctattatatagtttccaccaactatatatgaacttcataaatattctctctcattctctcttacttctccacccaccggagacaaataactaatggatggtgcaaacctaattctaatctaaggatctgtgccaacatacaattaaacgcgacattaaatagcattctcctactttcacgtgtaaagcatctttccaagccaaacaaacttctgcttctattctaattccacatggttaggcaaaagtgacatgcaactcaaaaaagctctcctctctcttattggtgtatccccatcagcttcctcaaagaaaaatggaaaataaataaataaaaaccccaagaaaaaaaaaaaaaaagacaactattctgtcccagaagcacaacattttgaaacacaagccttaaaatcatccacaataaagtgacaccaagattaagaaatagtgtaagaaagctctggtttttagaactattcatcttcatctattacaaagcccatgaatttggagataaaaggttagttagatgttaagaaagaaagaattgaaggagagaaaggtcacgggttccaccttctactaacaaaaaaactaacaaactaacaattaacatttgcctattaaaaaaaaaacaaagcccgtcaattttattaaattgttgacccactaatttcatccgataaccggtgaaagcagttcacaagcaacacaaaaactactacatcaaatagagataagtgaaaccacgacgttgaaagccaaaaaaaacaaagacaaaatccagaacaaggaaaaaaaaaaaacttacgctgagagataatgggcaaaacaaacaagggaattccacctcaaagaagaacacagatcaacgaattcttgtaacaggttctgcggaacagaaacccaagcgaagattacaacgattcctctgaaatcagtttcctcttttctcccccagtagatgttaccgcctctgacggcgaagccaccaccacgcatagctcggagaccgacccagtaaccgaaacgagcgtatttcagctgggaaattgcaaagttggaagcttttctaggtgggaacagtgaagcgtggtgctttctgttgagtcttaattctattggttaatgggtgggtgatgatggatgatgctggatttcgtggtaggtctttgtgttatgggtaaaaaaaaattggagcacgaattcacggtcacgaatgattcatcccttcgttgtattattcagtaagaaatgccaaatctatatgagtaatgagagacacacatgagatgatgatgatgatagagatttgctttccgcgtcagttttaacgttgagttgtattcatgcgttttttaacctttcagacgtgtcacattgaacatgaccttcctacggtaattttttgtacttgtgtaatgggaaaaagacctaaaatgttgcttgtaaaaagaaataaaaggagtgttgttacacaagtgtttatattaaattaattattgattttagattatttttgataaaattaatttaaaaattagttgaaagttaaaaattaatttattaaattataagtgtttgataaaataagttattaaaataaattaaaaatataaaataatagaaaaaataataaaattataatttatttaaaaggataataagtttttttttataaaaatataaaaaaatatataaaaattagaaattaaaagctataaataacgtttccaaaacattaaaagttattaaaaaattatttactttatgcaaaatcttcaactagtaaaaaaaaaattaaatatcttgttgatcgtgaacttaatcacaaacgactttaatttatgcttatatttcatggagattaagaaaaagattgtgaggggggccacagtttatttcataaagaagaataatttttttggaacgagcaccatgaatttttgttgcattagaaagagacacagaaagttgaaggaatcttgctttacatgataagcttaaattaaataaaggctaataatataatatatgtcagattataatgagagagaaaatgaacaatataggctgcttttgattaaggaaaaaaagaaagaaacagagaagacacttttgggtccacataaaaaaagttttaatttttataaatatctctaaatttgttttttatttttatattttaatttcataaattttaaaaatctgtaaaacaatttctgtcattatttattaataatttgacatgtattgaaacatataatgttgcatgttatatcaaaataaccatattacatatcacatcaaaataaacacttgcattatatcgctaaatatatatgatatcattattaaatgatgatattaaacctcaaaactaaaataaacaatttaaaaaaaaataaatgaaaatttaaaacatgtttaatgggggacaaagaaagcatgcaagaggaatgtattctctacaaacgttgtttgatgacataaaattctgtaaatgtgaataaaaaatatataaagctcgggggaacatttctcttcaaataagaggaatatctgaagaatctacctgagatgtgtcatggactcatcactcactcatggcccctcgaagtccttataagtgataacacctttcaaatactttaccttctatctcaaatataggtaataattttttttatttttaatcataaatataaataaattttatttatattttatttaatgatattatcttttaaataccattcatttaataaatttaaagatactttttagtttgatatcaaatttcaaataatttagaaaaatatttatttttaattagaaataataatttcataaaattaactcattttttattgagtgtaaaatattttttttaaccaggacgagagggagtattcttcaagaggaaaagaaagaaaacaaaaataaaaattgaataaaagcaaagaagaaacaaaggagagaaacggattagaatattaaagaaaagaaagagataagaacaaaattattaattatggcacctgatgcaaaattgtcaatcaaaaccaaatgagcgacgcaagtgcatagacaggaagtaatagcatcttgctgagacccaaatcaagtgggctaccaattgacccattgaaatactaggggattctattcgcatatatttttaaaaaaatagtattttctttctctaatttattatttaaatttaatttgattttactaattttaaaattgattccatttggtcctttgattgtttttgtttaatttcacactctaatttttagaattgattcattattttttaaaaatatacattttgtgacggtttaaaactacttagtgataattttgaatcgtcacaaaatatgatttcttataatttagattaaagaactaaattaaattaatttaaaaatttagagaataaaattgaacaaaaaaatttaaaaattaaatttaacctaaataataaattagacgaccaaaatactaatttaacctatttttttctttgttattctaatcctagtttatgctcttcccgtattgtactttgtttggtttttgcgatcttcaaaaatattccttaagaaaacacaattttgtttatcaaaatatgtaatataaatgtctttcttgttgtacagcagggatgcaaaatagtttcgtaatgaaaatatatatttttattgtatattccaatcaaaggaattgtgttttactagtgtagtgtatttgtaattcctaacacatcataaatatgtttatgttaacatgacataaatatgcttttattgtacacttttgagttttgaagcatacccaacgatagcaaacacacttccataagttattgttatggatatttggaatggggcaaatcaaaaaaggcccaacaagatttggtgactgtaaccgctctcaagccatgatcaacaatcttctgggattctcagtaagtttcatgggtgatctcctctaactgatttccaggtgagtgattataaatatgagtaattccaatggagtaaggtatacacattatgattctctctttttcttacacacagtgtacacgccccacgtccaattgtggtgttattcttgtgagcattgtgatcttcttccctgaggtgttttaccaccataaacatcctcagagagagagagtttgatcttatatcaatcaccaaatattattgttggacattgttcatagagggcagaatagttaccatgcttaaaaagaagtgaggacctagaagatgtgtcgatggtgagaagaaagttgttgtggtataaatatggggtaaaagaatgggtggaagaatcattcaaacaacgtcaacgaatgagtactttgttatattgatattcgtcactatgatacctattaagcttaaataaccttttgaaaataaaaggtttttcattttagttttgttaaaaaaattgttttgattttagttctttttctaaagattctttttgtttagttttcattatcaaataataatattaaataatgatgcaacattgatattaataactcattagtttatcacatcattaaaaaatttgacagtatagtcatatataatttttttttgtttgtaaactatatttttaaaattctcatatattcaaaataattagtgatggtaggctagatgaagggtttaaaaataccatttactaattaattaatatgctatttgataacaaagattaaaataaataaaaaaatattatggattaaaaccaaaataaataaataaaatgaaggactataataagaaacaccctaccctattatatagggattaaaaatttatttaatttaagtcatggaaaaatttaaaacattgatagtaattaatttgattttcttgcatttggtttcctttgttgggtaggaatgaaattatttttgagaatttttactatggtttaggcactaatcaaagctagagtatgatgtttgataaaatagcttataaactagtaaaaagagaagtgtgtttggattatatttattatgagaaataattaacgattttgtaagattaagacaaaataataaatagttattttcattttttcatgatatcatggtaattttaaattgcaattgatttacttgatttacaactaaaatgatggttacacctcaaatgactaccagagggactggtcttgtgaagcccaaaacaccaacagttagcaaacaaaacaaaaagatggtacttggtgaacttatgcgggataatgagcaaacaaagcaaaacgatgctactcgatgaacttctgtgtgatagtgagcaaacaaaaacctcatttaggtcacaatccctccctattatacactctttaatgatttaacaaaaaataagtacatgttgtttacatatcttttaataaaattttatgtctaaaatatcctcattttttttccttttaactccataaaagacatgttatcatttttaactaaaatatttgaagactctttcttctttttgtttttctctaattggaagtgaaccaatttttggaacttaaactcaccttgttggtatgcagtgttaacacagttaattattcttctcctttttagttcaattttttgttgtgtgtgttgggtcttttggttgttactttttttgttggacgtgttcccaacaatgctaatgattgaatatggtcttttgcttcaaattttagtattttgctcctaaatgatcagcttgtcccgaaatgacctggccaaatagggaaatcccaattcattgggcctttcaatacaatcaaatagaaagcccaaagggcgccatattctaggagcccaaacgatgtgattgaaaaaatcctcttctatctgatgtgggtcgaggactcccctcttcttcaaactccgattcatatttttcatagagaaatctctgatcaacgatagaataagatccattttgaatcatatttaagggattccttagttcggaccgaagaagcaatgtcactcgatcattatcaaactgactgcaatctttttctatacgtgaggatcccactagagcgccttctacttctaataggccatgaactggatcagaattattctcaacgagttgcatttttgtttttaactccattctttgaaatatttttttacagtaatgtgtttgatataatgtcttaatcaagagctgacacatcataatattgaattgaaaagatagattgcaagtggggatgagcaagatgaaaataaaataagagacaataaagattgagtaatacaacatagtgtgtaattgaaaagaaggatgtaaacaagatgagtaaaagaagaaacaagaaaaactgaataatttaacacaatgtgtgtaattgaaagagaagatgagaaattgattggtaaatagtataatttcagtttttaaaaccataaaatgagaaaaaaacaaacaaacttttatttattatatgcagtcagtttaccaaaaaacacaatcatttttttaaaattatttatcactcctccaatttcatatgaaaaattatacatttcactcacattttcattcacatattcatttacatttccactcacaagtttcacattttcatttacatgttcgttcacattttcactcacagattcatttacattttcactcacaagtttcacattttcatttacatgttcattcacattttcactcacagattcattcacattttcactcacaagtttcaaattttcattcacatgttcattcacgttttcactcacaggttcattcatattttcacctaggttcattcacattttcactcacaagttcattcacattttcactcataggtttcacatgttcattcacattttcgcttaaaggtttatttacattttctatcacatgtaggttccaaaactcattatttgttatactaacatatatatatgaatataaattaaatttttattcttagtaaacattttcagcacatcatgattagtcagtcttaaagtgaagaattataccactagcagtagaacaaaaccaccaagtaaatgagtgacatggtggtaagtctaagtcattacaatgttgttcgcatagtcacttgagtcaaacattttaatcaacaataataaataaatgatttccagttcacccattgtgtttcatgtggtcccatacatcaacattattttaatcaaggataataaataaatgattttgagttcatccaatatgttttatgtgatttcaaacatcaacattgttttaatcaataataataacaaatgattttaaaaatcataaatggtctcaaactgatcccttaatgaaactccattaagaactagacaataataacccatcaaaattaaataaatagtcttaacttattaaattataagtgttgataaaatgatttgttagaatagattaaagttttataatgatagaaaaataataaattataatttatttaaaaggataataaaaaatttgataaaaatataaaaatatatataaaaattagaaattaaaagttacaaataaagtttcttattaaaaaaacttatttaaaaaaattgtttatttatgcaaaatcttcaactagtaaacaaaaaaacttcaatgtcttgttgatcgtgaacttaatcacaaacgactttaatttatttttatatttcatggagacgaataaaaagattgggagggggcacaatttattgcaagaggaagaaaaaaagtgtgggacgatcaccattaatttttactatggtttatgcactaattaaagctagaatatgatgttggataaaatagcttataaactattaaaaagaggggtgtgtttgaattatatttatcatgagaaataatcaatgattttttatgataaagacaaaataataaagagttatttttattttttttcataatatcaccataattttaaagagcagaattaattttgtaacattatctgaactcattatttacaagctacctaaaagccttactagacacactgtttagatcatatcataagaatatataggtgcttattttttattttgtgtagtatctcactccaatttattgtttccattccttgcctaatggggtctcgaaaaaaatccttgagaaaggttccaaaatattactgtgtggataattttactgtgatttccattattgtgaatatattattggctgattttcttatttaataattatacttttttttatcggatgtcatcttttattttttctactattatcattatgaataaaatgtcttaagttttttctcttaaaaaaaataagataaatactaacatgacactatattataaagtcacgttagcatatgagagttgcaatacattgaattgaaacagttgtctcatgtcccaaactatttaatatcttaattctttttttactattttaatgaattatttattattaatcttctttatatatatatatatataaataaataaaagactatatttattatgaattatacatgcggtgaacttcaacttcaactactgcctcattataaggaacccgaataaccgtgtgaaatcgagtttgcattgagatgatgagggtggaagtagacacatgaagtcacgccacgcagtaggcataggtagttgtcgcggtgaggattccggtgaaggcggaggtggcaaggagagagaacttgattaatttcggttggcggttccggcggcagagacggcaacggagtagacaacgcgggggagaagcatgaggaggaagatggagtgctggtggtggccgccgtgtaggaagtagagacgcataactaggggccccaatggtgggtaaaagagaatttgtcatgagaagaaggagcttcatagttatgtcatctttccttcaaccagttggcttctgattcttctcctttattgctaacttggtgccaagaatggaccttctaaattggttcatgttccaatctttaaactgactatcattttttttataacatgtaatttcttcaaagtaataactaacactcaaattgaatatcatgattctattttataatttctttttattattttaagtttctatctgtaatttttttataacatgtaatttcttcaaagtaataactaacactcaaatttagttttgattacatttgtaaggatggaattgaacataatataaaacacaggaaacaaattattataattcctgcaacattagattgcatccaaatcattcaaagccttcttcttgatcttctcttctttttcatttttttagaagaaaaaaaaaacttttatcaataagttttctcgtgtttttcaggtgtcacatttatatatagtcaaattctcnnnnnnnnnnnnnnnnnnnnnnnnnnnnnnnnnnnnnnnnnnnnnnnnnnnnnnnnnnnnnnnnnnnnnnnnnnnnnnnnnnnnnnnnnnnnnnnnnnnnnnnnnnnnnnnnnnnnnnnnnnnnnnnnnnnnnnnnnnnnnnnnnnnnnnnnnnnnnnnnnnnnnnnnnnnnnnnnnnnnnnnnnnnnnnnnnnnnnnnnnnnnnnnnnnnnnnnnnnnnnnnnnnnnnnnnnnnnnnnnnnnnnnnnnnnnnnnnnnnnnnnnnnnnnnnnnnnnnnnnnnnnnnnnnnnnnnnnnnnnnnnnnnnnnnnnnnnnnnnnnnnnnnnnnnnnnnnnnnnnnnnnnnnnnnnnnnnnnnnnnnnnnnnnnnnnnnnnnnnnntaaaaaatcagaaaaatgaaaaaaaaaaagaatttttttttattttacaggcacattaaaatagcttctgattgcataatgattttacttaaacaaataaattaattgtattcgattgattgcaatattataggcacattaaaataactattgattttcttaatttatttcaatattaaaataatcacaacactaaggctaataataatgaatgccaagaataatagctattatgagttatttcaagtgtacattaataattgataaaaatacgaggtctaaggccaatgcctaaattgcttagtagtttacacgcccttgctgttatttaattataaattgttgttaatataaattttnnnnnnnnnnatgacaaaaagtaaccaaggaggtaacacactaattttttaattttgtaattacttaacccactaaagtggtagaaaaagtaacacaccatgcaatagaacttaatccttatgaaattcatcataaatctatcaaagtggtaaggaagtagactatataaagaaaatacagaaacttaataaaaaaaagttaatataactactaaactcttctcagtcattatatatatactattaatataagtatattataaagtagtttgaaaatgcactctaaagtctatcttaataaatttttaagttttattgatttaaaccctgtcttgacatagaaattaaaatagtagaagtccagcatattaaactaggtttgattcatcatcctttatataaatatgtattcgaaaagcataatgcatgaatatacatgtcaattaataaaataaattataaaaatatatcaattttaacaacaacaaaaatacaatagaaatgtgaacatgaagacaacacctgtgtttttgtgctagtatatataatatttatagttctcctgttatcttcttcttcctttgtattttgtatagtttatccatctttcctttttttcttaagaaaagaaattgtatgttctctaatttcttaaaaatatattatctctttttttcaatttcttttgatgtgctctctctctctctatatataatccttttgttaaagaatatactaaatgaacgaattttccatgtcatatattaacacggaaatgttaaaaaataaattgatcagtaaattttgtaatcgataaaaaaaaacataagaattgatgacaagttatattaaatttaactttgaatgtaaattttgtcaaagccttcgaaatttcttggcatggtcctgttcaaactaacataacattttactacactattatgtcaatatttttttgttaaatattagatatttaattaataaataaactaaaattatacaattaaaatagtaggaaattaattaataaaagggacaaatttgtaaaatgataattgtaagaagaaaaaaaaatgcaattaaaacccaattaatcaaatcgttttaaaaaattacgctaaacactagttacatgaaaatcagacaccaatagtatttgtctacctttcattaaataagcaacattccacctcccaccatctacgctgctacgatccgatgtaccttgcattttctttcttatccttcggattgccttactattctcgacaacggttttaatcttctgaatatatttaataaaatagcaatgccataatataaaaaatactataaaaggaagataaataaagtttgaattagttaagatccagtaagtatttcgctatttacataattacacatttaattttgacacttatagtattaaagtaaaaaattataaaaataaaaataaaatgttttcaacattatgtgatttggactatacatctttgttatttaagacttcacgacataatcttaaaaaaaacaatttatatatgtaaaatattacaaaaaataatgattaaattaaatatatggactagtatataagaggaagaaataaacatacctaagcggacaaatgataataaaaaaaaattgttacaattttttctctctcgtaatttaacattgcacgttaaaaatcctgcatatctctcttgcgtggtgttcactctctatttttaaaaaggcaccagatccgaagcaaattaaacctggcgatattaatgcaccacaccacgtgcaagtcttctactttcatcatttatcttaaatcgttttttggttccatcatgttagaaaaaaggaagatgtacactcgaaggctggaaagtgcacatttggatccatgataacatggataagagtgatggttgtgccattttggacacgtgtgtaatgatgacattgtacatgggagggaggagctatggaccctgtgccttttggtattcgataaaaatcacattacacaaacatctttttattttaaatatttctttaattttttttatcatatcataaatattattatatttatatttgtttttccttttctctgggtattaaatagtccaatagattttcatgtaacattttttttttgacaattcactctgtcagtgtcatgactcacgaaggctttctcatattcttgcttctctctgattcataacgaatactatgtcacgtccatgtatcctttactgaacaaccgttaagccagatgccaaagagaaaaggaaacatacaaaattgagattaaaatatgcagctagtagcaattgccaatttggttcattgatacattatgacgacgattgtgatcatgtgaaccgtcaagcgttcactttcaatttaaagccatgcaatggctcctcagcacttttgatcttttctttaaatgatgaaaaacatatttagcaacttcaataatggaaggatctaccccaaaaagacaataacacttgcaaaatggaccagattctcttatattcattttaaaaaagtgattctaagaaaacaatgagaaggagaacatggtttccgttattaaccgagcaaatccataaatttaggcatgtagggtaggtccatgggtttgtagagacattactccttttttttctatattaaatggtgtaggttgtaggtttggttgtcattgtatgtggttgttaattttgtgcctgttggtaatgctaagcatatacagtatatatatatatatatatatatatatatatatatatatatatataccttcttcaatcatcaacccgtgtatgagatgaagacgactttaatcaattagtttatgcagatttgttaagtacccacacgtggtccccacaccaaataagggaatcatagctcgggatggagaggatattccaaatggcctaaaggaaaaaagaatgcgagacataaaaaaggtaattgaatgaagctacggaaagctgaaaaggaaacatgcaggcaagagggaaaggtcgaagaaaagtcacttttcacagaaaattagtaccaaataacaattaatattgttctatccatgaattcttctgataatgaataattataaaaaaaaacagccgcaggaattaattagctgaacccccttattgtactgcaaacactgaaagagacggtctcaaactctctcaattacattaacatattttagatcaccaatattcatagtgggaattcttgtgttctttgtatattttccacaaaacccaattttgttattttgttttccttcttttctttttcttcatctcctcacaaagaaggttctactacttctatcagagtgctgagattgcagaaaagctagcttgttgtgtatccaacataaagagaaagagaaaacagttagctatacataaaccaacccaccaccaccaccaccaccgtctttttcaaagcaaccagaaaaagttgcacgctcgttttcgttttatctcgtgtaaggttagcttcctcaccagtgtactccaataactaaacactacaaactcatcaacctccatttctctctctaaaactaaaaatgcaaactctctctctctctttcattgaaggcattcaatgtaaacgaacccactggtagcgaccctccaacggcaaatctctaacaatatcaaagttgtacctgcacgcaagggaaagttgttagtcagttagggttcgatttctggcaccgcttgagtacgagctggctcacattccttatcatgtgtcgcgcgaaataaaaaataaaaacaacaaataaaataacacactcttcgcttaatgttgcaaacttgcaatcaactatagtctatattactatataaactgtactacttacttctctgtgaaccgttttcgctcgtacttttccgccatcgcaaaaaactcttcgatctctgcttgtggtggcgtcttcaatttccgcaccgccgcggaggacttcgccgattcctccgagtcttcggaaaactcactcaacaaactgaacaaccaaaaccgaagcaaataaataaataaataaaataaaataaatgtatgtatacgcagtgtttcagtggcaacatttcgttagaaaattgatcgtgcgcgcatacatgagaaagaactcgatcgaacaaaaaataagtagaataaaaacctgaacgatttgaagttgcggttggttgagtcttctaccctttcgaaacccttggtctgcattaatcggcgaggaatatcaatacataaatagatataaagtaattaaacacaggaaaatttagacaggttatataactcggaaaattacgaaagtaaattaacaattcataataatagttcagaatttcgaggagcgaacctgcagatctgacggcgcggagtggaggtccttaacgtggctggagctgcagcaagagcgatcggagcaaaactcgccggtagaactgacggaagcttccggcgagacggtaatgtcgggaaactgcgtatcggaagagcgtaactcgaaggaagaggaatgagcagtagcagcgatggtttttcttttcttggaaatggaatgttcgcttgaagaaggttcttctatggacgcaattgtgagagagcagcgtttacactcacccattcttcttttctttctgtgtgttgtgttgtgtgagagtttctttgtttctattctgagatgggctaggcttagggagagaggtggacggagcttaaaaagagggtgatcgcagaggaatatttactgagcgcagtgaatcgatccgtggacggtccctcttgtctaaacgacatcgttacgatcattgttactgctaccctcccttttaccctcttcttctcttctaaataataataataatgttcagttttagatttttatgacgaaaattacagaataatttgaaacgagtaaataaaaatactttttctttttttacaaataagtttactcgttgaattatttttacaaataaatcaatcactcacatactgaaattatagaattaaaggattttttttcgtcaccggtggggccaagctaggccaaatatcgaaaagatgaaaatgcgaagcggttagctgttcctatgccgatttgcaacatcccatgtgagactcttccttctgcgtatgcactatgcctttactagggtaaatttttgtttgagctttttctccccctttattttttttattaaaaaagataaagttctttttgcttttttatataaacaaattctgtaggttctatttggaatctttgacgaactttttcatatatatttataaaagaataaaaaataaaatataattcttccaaaaaactaagcttctctaaaaaaaatatttaatttaaacattctccaaaaatctaattttaatttattcatgtacttgttaatttaatttataagatcttcttcttaatttcttttccataaatatttatggagatttaaactagatcttactttcatcatgcacagtacgagtacaatgaattcaaaaaggtttttaactggatgattaaaataagatccaacaacgcttagtggctgagttaaaatgcatttgctaatataaaataaacacagcgaaatgtgatataggtgttttttttttattttttatatatatgtaatgatatatgtgttattcatatttttatttagaatttttttacttggtataccgcaannnnnnnnnnnnnnnnnnnnnnnnnnnnnnnnnnnnnnnnnnnnnnnnnnnnnnnnnnnnnnnnnnnnnnnnnnnnnnnnnnnnnnnnnnnnnnnnnnnnnnnnnnnnnnnnnnnnnnnnnnnnnnnnnnnnnnnnnnnnnnnnnnnnnnnnnnnnnnnnnnnnnnnnnnnnnnnnnnnnnnnnnnnnnnnnnnnnnnnnnnnnnnnnnnnnnnnnnnnnnnnnnnnnnnnnnnnnnnnnnnnnnnnnnnnnnnnnnnnnnnnnnnnnnnnnnnnnnnnnnnnnnnnnnnnnnnnnnnnnnnnnnnnnnnnnnnnnnnnnnnnnnnnnnnnnnnnnnnnnnnnnnnnnnnnnnnnnnnnnnnnnnnnnnnnnnnnnnnnnnnnnnnnnnnnnnnnnnnnnnnnnnnnnnnnnnnnnnnnnnnnnnnnnnnnnnnnnnnnnnnnnnnnnnnnnnnnnnnnnnnnnnnnnnnnnnnnnnnnnnnnnnnnnnnnnnnnnnnnnnnnnnnnnnnnnnnnnnnnnnnnnnnnnnnnnnnnnnnnnnnnnnnnnnnnnnnnnnnnnnnnnnnnnnnnnnnnnnnnnnnnnnnnnnnnnnnnnnnnnnnnnnnnnnnnnnnnnnnnnnnnnnnnnnnnnnnnnnnnnnnnnnnnnnnnnnnnnnnnnnnnnnnnnnnnnnnnnnnnnnnnnnnnnnnnnnnnnnnnnnnnnnnnnnnnnnnnnnnnnnnnnnnnnnnnnnnnnnnnnnnnnnnnnnnnnnnnnnnnnnnnnnnnnnnnnnnnnnnnnnnnnnnnnnnnnnnnnnnnnnnnnnnnnnnnnnnnnnnnnnnnnnnnnnnnnnnnnnnnnnnnnnnnnnnnnnnnnnnnnnnnnnnnnnnnnnnnnnnnnnnnnnnnnnnnnnnnnnnnnnnnnnnnnnnnnnnnnnnnnnnnnnnnnnnnnnnnnnnnnnnnnnnnnnnnnnnnnnnnnnnnnnnnnnnnnnnnnnnnnnnnnnnnnnnnnnnnnnnnnnnnnnnnnnnnngtaattattataaaaattagtaattttattatatatgatgaattataatcgcgtgatagagtaaaactttttacataatatataactatttttctctttattaatagtttcgcttcacgtgaagcatttcaattttaaaactgaaaatttccaaatataggtttggttaagcataagcttgatgatttggtagaaagaaaacgaaaagatgaaaaatatggtaaaagtgaaaataaagtcgatataaaaaatattttgatcgttatgcttgattgaggacagatggtttacttcaatgttgatatacttgtgtagatttcatttgtaaagtgtattgttatgctttatttataatattctattttttggttaaatatgtattttatatctgaaaaatatagctagtttttatattactacataattttttattatttaaaaaaattaacgctccttcttttgcttctccaagaacgagctcatctctgggatcggtaccagagctgctccgttcggccacacctgctccttcgattcgagctcaatcagacgttccaaaaccccgaacgcttcgtccatcttacgcgctttgattttgacctccatgagcgcgtggagcacgttggtattgcgcaggttggtgctgagacgctcttcgagaagcctctcggcttcctcttcggtgaaggcagtgtcagtttccgcgacgggggagtgagcggggcaacgataacagcgggcgtgtagtggaaacacatgaagaagaaggcaacatcgacgatgacaacacaggtggttttgaggagaggaaggaggtgtgtttcttggggtgtgaaatgtggggtcgtttttcaaggatgaggaagaggctctaatggaaggtgaaaatcgaatgtttcttgaccaggagcaatagaccccgaaagttgtgcactgaaataagaaggatttgccccctaaacgacgaaggaaaatggggtgacggtaaaaagcggaagaagagggaagaggataaaggagtgggaaatggagaagggtggcacaatttggaaagaaaatccatgagtaaggccgtggaagaaggagaagtgagtgtgaacattgatttgggtaattattgcaattacaacacacacaagcaagaagaagaagtcattaaactaaacatgaatatgtgttaatgattaagtttgatgagttgatactttgtcaagtatgttagcacttataatgagattaattatagatattacataaaaaattgaccaaaaataaatttaaggtaataatttaaaaatgttttattttttaatatgaaaaacatatttaagtcattttttaccaactaaaataaaatttaatctgaattcttcaccaaatcgtgcagatttttaagaaaaataatatatatatatatatatatatattatttttataagttttcttttggtatttcgcatatgttttggttacacatgtatcatatatgaatgagtaatctgctaccgtttcgaagctatttttagtaacttatatatgcatttatccaatatttgatgtggaaattgaagtatatgtgcgtttttaacagctattgctattcaattaattaatcatagaatcgcgattaaaatcaagatgatgaaagaaaaaagccctataaagttaataaaaataagcaactatatttataaataaatttaagttaatttaaataagcaattaatctattgatttaattcgatttcgattaatgtgtgctacatgtaagttttatttttatcaccaaaaatatattttacggtaccacacagtcacacactccatatacacaaaactatatccttttctccatctctccccagcaactagctatttacatgtcagttgttgtattaggcatatgtcacgtatgtaggatcatcaacagtatatgccatctatctctttagcaggtgacctcgaagaaattcattttgtggatgtacaatgcatatgaatataataattgccaaaaaaagaattgaaatacagaaacttcttggatattcttagttaatttattttatggaaagtgctatttttttcttctgataacaccgatagtgctattttagcacatgtcacactaaagaaattaagataacatcactcacttttttaaaacaaatatgatagagtattcgttagaagtcaatcatttaaatggattaatttattttatcaacatgactattttggatgaaggacaaacgcacatgaaagaaagataacgtgtacagtgttttcttttaaaaaataaatataaaaaatatttttctaaaagagataaacttgttagatagatttgagtaactcaaaggggttaatcttcactttaattttaatccgtaagaattaaagataacaacttatattttatgcttaatagagggattaatgtgacttattgagaaatattcataatatattaagaaatagaaaataacaattcaagaccaaatcaccaaaaatatgttttcattcataaatctaaaaaatgaaatacttaatgttcattttagtttttgcattttgtcattgacaatttcatctatgtactatgaaaatgatcaatttatcacgaatgtgtaaatgtactaataatatagtctgactgtcaagttatctatattctcgttaaggtttttgtcaacttgaaatgtaaaggacaatgtaacaaattcacttgacgaaagtagtgatcttcatgcatagggataagtatctagggaccaaaatatcaattctatcatttttatttttaccaataaaagtcaccacacaaagtgatcattcatctttggctccttcgccaccatgcagcaaggtcattgcaagaaggacctttgcaaactcaacctttgtcttcaatttctccttcatcaatgtctttgactatactctgttgtatttgattcctccactgcctctgacgatgatgttaaaaggaaatcatcaaaacttagtggttcttccccctctctatgactcaagacaaggcttcttcaactccacccttgtctaggtcaccaacaacaatcgtccattgattgaagatgttccattttttcttttcttttgtttggtttctttgttgttattttcctgaattctatgttttcaagtgaataaattggtttggacttatgaggatttgaatttgaaattaattattctaattcctaaatttgcgattttgtggtttaaaatttcgaattgattcagatttggatttagaataaaattgaagaaaaaaagtttctcctcatttaatgtacatttttaaatttctataattatcgtgaactattttatctttaaatatattttttagagaccattttatctttgcataaaaatttaatagtacgaaatttggaagaacaaccttcttctcaatatacttattatctttgtaaatttaaaaatcaacatatataaaaagttttattgaaaatttagtccaaaacacaattgattctcatagaatatctcctacattcatgaaattgtcaagtcagtctcaatatgcaatgtatgcacttaatgttaattgaaacagaaataacttaaagatcagtgagtatatttatgaactaaattgatcatttttatactataaaacaaaattatcagtgctgtaaattgctagaactaaagtgggaatttatccccccccccaaaaaaaaaaaaataaagcagaacacattactcttcttctatcttcaatacataaaccgcatgtgagatttaattcaatttattttgatctggtattttttgtagctaagcccctcataggcttctctgcgttggcattccactttcaaactttatttctcttcttccccccctcccatttggactgccatatttgcacacactgagcacaaattataggaccatgcatggttccgactattagcttttatcttaatattaaatattaaattgttagtggggactacatcaacacttgggattttaggttcaaattcaaatcttgcatattcaattgagcactgttttatgcccatgtacatcacaacattggaatggaccactggctgcgactctattattagaaattggaaaagaccgttgctgagtaattgatcaagatatatcactcatcccaactcgtgcaggtaagttagtcacgcctccttattaattgcatgtagtttaaagtggaagaaaatttggataagttttaggtttccctgagaaagctttcactcagctttaatctcaagaagtgtggcagcttatattttggaacagctttattactggcagaaaatagatggactcaaacggaaaaattcatggtggttagtaagggtaggtaacttatgtacctttgcttccgttacttttggtggaaggtaaattatgtacatgatgatatgcatgcaataaagtccatgaattagtaaggtaacactcatcaaaactttttttttactgactcatcaaaacttattatactacttttctatataaataatactatattctccttttgagtttttacaatacttttttcgttgtagatattttttttgtcgtattacttgttttattttgcaaataagaattgatgatgcattggatgagtttctcacctaaactagttatgacttgaatttgattctgaattttctaatattggtaagcgaaatataggttcattataaattttcagtgatgttgattgtatttcctaatttttatgggagaaattatcagatgatttatgattaccatctgtggttgatggtgtcaaccgaagtctattaacacattcaaattatatattttcaaagaaaaaataatatgtgcaaacattcaggaaattactacttgcaccccattttatatttatattgtttttattataaattacattattttaaatatgcagacgctagttttgcagccaacagtgaagtaatgtaaagctaaagctaaaattgtgcccgaagcactattaatattgctaagaaaaaaaactatctgtgctttaatccaaacaacacagagacagataggaaaaagaaaagaaaggaatagaagcagagaaagtactctgctaatgattaaattgtaagctgattgtttacagagtagatatgcagtatgttagagatagtgggaacaatagatgcacactcattccaatgaaaggggtggatagtaacagtgatgtgaatgcgtatcctactcatttggcttatatattgtagtgtcaaatgaaatgaaggactttgatctaacaccatcataagcgttaactgctatttattacaccgtaccatcatttggtttgttttttacacggagactatcatgctatatacccagagaggatatcaatttggattcaatttgtgtagttatatatcattatgtccatggacaacccaagcctaaagaacaatattgcaatgcaaatatcgaggccaatgatgtttcaaaattgaggtggtattagttaacaaaggtccatcgtaagggtcaaattcataattcataagaaaaataatttgaattctgtcatgagaattttattagtgaataatttataagtatttttataaatgttcgtcttcctgatcctagtaagcttaccaccggcagatctatatggcagcaagggtggacagatgtaccctctcattttaataaaatcactagtatttgtcttaaaatattatattttgcatcctctaattttatatatttgaatcttcttattttatatatttgaatcttcttatcagtttacatgtaagagactaagagtaagtaaatacacaattttattttaataaaatacaaaaaaatattatattttataccccataattttatattttgaacctcctaattttatgtatttgaacctctttactagttcacacgtaagactaagtaaatgcactttcttattttaataaaatgtaaatatttatcttaaaactttatactttgtatctcttatcttcgtgtttgaatccaactatcccatatgacaatgataacatcaatttttattttttaaataaattgtcctcactgattcagggtcctagatccaccgctgaagcttatatccaattcctctaaacttttcacaaaaagaaaaaaaataaggtggtattatagaggatttgaagactaacgaggagtgttgggactttgtgcttttgtacttgcattgcatgaatgaatatccatctcctaaagtagttgaaggtaaattaaaggggccaatgaacaaaaaatgggcaaacccgcaaaccacgttgttggcaggttggcattactacttccagtgttgaggacaaaagagccaaaaaaagtgttaaagaaaaagacaaacgatgattccacaatcctcatgcatgtcctcacggtaacaagctctatattggaggttccgacattgcatatttacatgtatgaaaacattcaaaaggacgacagaatagcaagcttttgattcacttttcattatcattatttacttcagtctagtatttcttaatcttctgccccttttctaagttagtgaaaatttatctttctccaattcaaggactgttacaggattttatttggagagggattgatatgtttccttacattatagtattttaactcactatcgtgtaccctataattaacatcaaaggaagtaattttcaagtattggattcctctgccttttgtctttttctgtaagtaattaaaggggaattgttattctaccgtttgatgtacccgaattatcagttgtgtacgttttgtttctaaattgggaaaagatagctgtagatattatgcctcatgtgtttgagatacaggtacaataggaaacatttcaaaaaatatacatagctgagattatagaaatatcctagagtttatatgtctatctatcaccatcattatcataaaattttgtgtacatatccataatgtaaataatttatacattcacacagagtaaaagaaaccatgcataaatctttcttgtacggttaatttgttaaatgttataaaaattaccttaaaaattatatatataagaatttatgtgtatatatatatataaaccacttctgccatgcatcataaaaagaagttaatttgaaagggtggagtgaaaaaaagaagattaatagtagtgaatcaatattaaacacgttatttaaatttgatctactacccttatatgtgttgttccgtatatttatggcatcacctgttgcctcattcatataaatagtatatatgtaactcggaagtgttcgtacatggctacgatgactctgatggttccatgcagttactgatggtgatgcagcatttgcttactacactgataagttactggtgcacacagctactcatcagtcatcactgtttataatttttctccttattcagtgcatagggttctgctactagtacaatatatgagttcacgttcacgttcacgtatatggtaactaaacatattcttaactttgaaactggccattcatgaattaaactgggttctgcattctaaaccctacaagcactccggttggagatgctcttagtttgaaactacaaagcccccacctcgttggaaagacaatattgcccaatcctttaggacacaatctgacacgttggggatgggcctcccgtgtcttgcggctaggcgacattttttttttttttttgtagtgaaaatcaatttgttttctcctagtccactttggtaaatctctattctccttgtgacatgagccaaaaaataaaattgtgggaggcgttgaaagtgagaaaggatgcaagtaattaatgtagagaagtagtgtattatgggggactttaatggtgtagaaaaggtgttcaaagaaaaggaaaaagggagatcaaaatacatatatatatatatatatatatatatatgagttttgttaacctgataatacccatttaacatcattatgttaataaattataattaaaaaatattttaaaatatacaatgttaaagtttgttaatatatttatattaaaaaaataagggtgtgaatttaacaaatatttgtgagatttattaacttacactctcttatttttttagtatgaatatattaataaattaactatatattatcatgaaaatactaacattaaggtgtagtcggttaacatattcatgctaaaaaaataaatgttactataaaaaatgtttgtttgtggaatttgctagcatatacttaaaatatggaattaaaaatattaaaaatgtttaaattattctttttttttattaagggggcaaagcccaagaactacaactgtacaactgcattctacgagtcaacggcagacccatagcctcatgaagtaagagactcgcacattgacaagtagtctgaataatactaatagtttaaacaccttatcttattatcatcttgtccatgtcaaatgtaagacaaaacaataaaattatataactttttatttatttcaaatctgaataacacgagatattattgtaaatttgtaattaaatggctccaattttatataaaaaaagcggcgcaaataattatgtggaaaaagtccaacctgttatgacctcatctaaggagcaaaaattcataatgtgtttttcatatttgtcctaactaaaaataaaaagtggactaatcacgataaaagtaaaaatgtttatttaaaaatattttttaaaaccgttatttaatttagtttttaaaagtagaaaatataaaaggttttacattttttctttttagtttttcaatttttttttttaaactgatgtagttttcttaagttctatgggacccgatcactaattctatttttagagttatgtgtttggagatgaagaaaaagtatcataaatatttaggaatcattctaaataccaataaactttattttgatgacattattgattcccgatatatgtttttttttttaagccatccccgataaatatatgttaaagtatagttttcaaattttcattaatttcaaatttgattagttatgttactttgtgctattatgagcaaatgacaatttaagctttgagctagttataaatgtatcttaactagaagaataaatggctcaatgcatgtttgtagaatcagttcaatctaaatatataaaaaaaaaggtattttgaaaattcttaactcaagagatttgtatcaagccataaggtttgtctcggttcaactttataaggcccaagacccgcaacagctaaaccaatcatcttgaagcccagctcaccttatggcccaaatgggagaaaatggttcataatttctccaaatttactttgttatagttgaggtattttgagttcgaaaactatcaaaactgagtgatgattacgacagagactgtatagtaatcctcacctaattttaaacgaattccacactagcatgtcatcgtcttgttttcccatctgaaactgattgagtattgatatatatgaataacttttatctcttactctccattttttctattaactttagcaaatacaacacgcaaggtttgcgaggagatttttaagttgttggggagtgaactaaggacagacacatgaaaatgaacgttgaagcattctcaactacatgactattcctcctactgtcccacgataaataccgatctatgacattggaatcaaatgagaagtgagaacaataatgtaagatccagtatacgactatacaatgatatatgggccctttattttttggtacacttatttagcccttctttcagagtaattattaaagtgagcctcatcattatcctggtacctacaatcttgtttattgcactccacggttctagcaaaacgccaacaaaagttctgatatgacttcgagttagacacgctttactacatgtgcccactcccaaaatctttcagccttctcttatattcatttctacattttatttttatgctccacggcttaataattctatcattgattcatcgtatatacatataaattaatcaaatttcttgattaaatactactagtcttcctgtgttcatgaaactcacccagtaatagactaacagcaactgggaactagaagcgattcttctgcagaaacattctcatatttggatgggtaaattcaagacaaaaaaaagtagttaaatatatttttctttaataggatacaatatataaaaggtagaatgcataaactatcaaacaaccgagaactaaaaaggacaatttaaacacaaacaaaatagagcatacacacatcataatgttcaatcccgtttgagaaaggaaacaatctggtcgatcaaaacctgagcattctaacaattcggtttgaacaaatgaaaaacatggttctcatccttcgtctccaccacttccgcaacaccagaccacccattcttctcaagcaactccttatagtacaaacccctgtccctcaccaaatccttctccgcaacacaaagaagcaatcttttacaagctagcttccccagcttcggatccttactcgggttaataatctggtcatcggatccactctcactagggcacgcaaaccgccacaactcgtgtatcttcttcgcttgttcaggcctgtttgcttcacacccaaacggttcctctccccagaaaaagggatgcaccaaaacaaccccttcaagctttaaaccaagcaacccttctgttccaaaccgaatacccaaatagctcgcaatgttggcgccggcgctgtcacccgcgaggaacactttctcaaaatctacgtgttcattcagccactcatcaacgccgtttccacccacgtgagaagccacccatttgagtgcactccacgaatcttcgtggccggtgggaaccgggtgctccggtgcccgccggtagtgcacggagacagcaactacattagccttggaaacaaccttgttgaggaggttgtggtagttcggagaaaaaggggtttcgatgcagaaggcgccgccgtgggtgtaaacaaggagagggagcttttgcttcggcggcggggaaaaagtggtttttttgggaatgaaaagccgcgcggatattccgttttcttcggagattacgatgtctttcgattccacgttggtttcggggtcgaggcccgcaggaagaacctctgtgccagcaaccctctctatgcgaccgcttttgtagactttgaggaacgggtaaaggtcgtaggttacttcgttgtcgtcttctgtggtagttgaagccatgatcgatgagggtggtgtagagtttaagggttttgcaagcttcagtgaagggatttgaagagggttgctgtgtgcttttgggggaagagatggaagaaggaaggaattgctggtcaaattcacgaatgggaggtttgactttgttggggtgttaaggtatttgagggtcagtggctggtgtgcactgaagcttgagcaccttaccatattgtcgtctaacaattttctcagtacttttttttttttttcaccatatatatatatataaaggggnnnnnnnnnnnnnnnnnnnnnnnnnnnnnnnnnnnnnnnnnnnnnnnnnnnnnnnnnnnnnnnnnnnnnnnnnnnnnnnnnnnnnnnnnnnnnnnnnnnnnnnnnnnnnnnnnnnnnnnnnnnnnnnnnnnnnnnnnnnnnnnnnnnnnnnnnnnnnnnnnnnnnnnnnnnnnnnnnnnnnnnnnnnnnnnnnnnnnnnnnnnnnnnnnnnnnnnnnnnnnnnnnnnnnnnnnnnnnnnnnnnnnnnnnnnnnnnnnnnnnnnnnnnnnnnnnnnnnnnnnnnnnnnnnnnnnnnnnnnnnnnnnnnnnnnnnnnnnnnnnnnnnnnnnnnnnnnnnnnnnnnnnnnnnnnnnnnnnnnnnnnnnnnnnnnnnnnnnnnnnnnnnnnnnnnnnnnnnnnnnnnnnnnnnnnnnnnnnnnnnnnnnnnnnnnnnnnnnnnnnnnnnnnnnnnnnnnngatgtttagaactacttaaaatattataatttataagctagtccaaagatcttaattataagcttcctggaagacttatatcacattaacaatagttaacagttaacactacaatgaccgcgggagacaaacgtatgtgtatatccttaattttttgctaattaaattttctaatagagatgctattttaaagtcaggcaatcatttttctttggtggaatttcattttgaaaacaatagtattcaatgttattttttatttttgataatagtttattttgtttttataattttactgtaaaaacaatgatattttcttttttagagaaatattttatttcttttatttatagtttttatggtgcaaataattgtattattatttttgtatagacaaaatatctaatattaatattatttttgcttttataatttattattgtnaaattggttataatcgattaaaattaataaaacactcatcaacaaaattcttatatctcaccaagaagatactaacgtaagagcaattaattaaaactttagattcttaattataatatgggtttaaacataccaactagatcatccattattagtatcatatatatgatcattgattcctactggttcatacctaattttgtaaggatttccacgtattaagtactactactaaatagcattacagtaaacttatacttgggaattggcagcgtatatatgataataacagtggaggtcaacatatgataacaatgcacacatgagtctcaattttaatttcaatcacactttcaatcaattaactaaacttttctttaacttgatacgatcatacgatacaagatagaatgcatacactattacattgacaactaaaaaggataattagaacacataaaaaagacacagagcacacataacaacgttcaatcctgtttgataaatgaaacaatctggttaagcaaagccttagcattgtcacagttcggatccaacatatgaaacacgtgaccctcgtccttagtctcaaccacatcaacaactccagaccagtcactcttctcaagcaactccttatagtaccaacctctgtccttcagcaaatccttctccgccacaaaaacaagcactctcccacaggccagcttgcccagattcggatcctgacccgggttgataaccgggtcgtcagatcccgtcgtggtggggcacgtaaaccgccatagctggtgcaccttggcagcgccttcagcctgcttcgcctcacactcgagcggctccgtaccccagaaataaggatgaaccaaaacaaccccttcgagcttcaacccgggtaaccgttctaacccggcccgaatgcccaaatagctcgcaatgttggcgccggcgctgtcgccggcgaagaacactttttcaaaatctgcatggttcttcagccactcttcaacaccgttttcgcccacgtgagaagcgacccatttgaggacactccacgaatcttcgtgggcgacgggaaccgggtgctccggtgcccttctgtagtgtacggaaacaccaatcacattagcctttgagacaatgttgttgaggaggttgtggtagttcggagaaaacggtgtttcgattatgaaggcgccgccgtggaagtaaactaaaagaggaagcttttgctgcggtgggtaagtggttttgggaatgtaaagcctggcggatacgccgtctttttcggatattacgatgtctttcgattccacgttggtttcgggatcgagacccggaggaacaacctcgacgcctgctagcctctctatgcgaccgtttttgtagactttgaggatgggtgggatgtcataggctacttcactgtctgtggagtttgttgtacttgaatccataaagggtaatgaatgtaagggttttttgagtttgtgagaagggattggaagagggttatgtgatttaaggggaagggatgggtaatcaagttcttcagtgatgggaattgaagtttggttttgttgggacgttaagatatttcagtgccagtggttggtgtacgtccactgaagcttgagcaccttatcatatcttcttctaaagactcccatagtcgcaatcaatactctatcacctatttataaaggccaaaggaaagtaattgtcggttaaatgtttgtgaactgcactttatgcatattaaaaatgagatacatagaatgatagaaagagcaagaaacgtgtataaagaagaatgacatactgtaattaaaagaaaaaataataatgttactagaataatacatataataaaaatgataaatgtctgtcccattttagatgaattgggagggaggaaaatgacagatagagagaagaaggaaaacatttgtatagcacttatttataatacttttaggaatttacttaatcaacgatatgatgattgatgaatatgtactcaaattgttggagtggaaagtgggcagacgagataaaaataaattttgggaggatttattgggtagggaacaatttttggcaagcaagtacccaagattatttcttaatttccgtcaaaaagaggaattgggagaatgcatgggagagagatgagtggagaagagagtgttttgtatgggagagggaaggagcggagtgtacaaaaatacaatggactagagaatggattgaaataaaatggactaaaaatatcattttattgtttggaaaaaaaaaataaatggaataaattattacttttatgtttttatatcatctttatctaagaaatataaaatccatatcagttcaagtctatgagattggcctgtgtagaaaatgttatccaaaatcataaatatttaataaccgtcacattcgatgacaaatacttcctcctttcttataagattttcaattcattcattcacgttctttaacaaaaaaataataattattttactaaatttgttaactatttgtcttattattttaaagttgcaacctcaacttagttgttcaactaaaggtgtttgatggaagtgaagaccatcttgatgcgggttctcacaaaatcttttaaacaactggactaacaaattgagttccattatcgaatatcaaggtatgaatgatgtggaactgacacactatagttttccatagttttttcactttatctttagttatctttgtgatgggctctgcctcaatccatttagccaaatacatatccaccacagaaacttcacctgttggggatagagtttatttattcaatccccacatgaagaaaggctatgatgacattaaggggtgcatctattctaaagatcggaatgtagagaaatgttatgctttagacatttgtcgcaatccttgaccagttccatgcaattgatcttcacaatccagtaatacccaacaccctcatgatctttgcagctagccagtgcccagtgattaaaaaaatggttcttgatgcgttattcttttaattttatattactaacactatttagtagatttttgcttagtagactactatgttggaagtccagagcagttttttttcttttcttttcataagcacgtccctgctaagaataattaattaaagaggttaccatagatctacttaaaaattggtaggtttacatttttttgtcttggacaaaagctcattcatttttattctaaataattaaattcaaggatatgatcgtaattttgatttttttctcctctgtcccaccgccctcattctctctctttccccaccatcttccaagttccagcaaaaaggaaaagtgaagatgttgtcgctctatcccacattggtaccaggccacggttgaaacactcaaagttgaatcgtacattgacacaaaatgcattaacaactaatagtcctcaaacaattttcagcttcatatatgcaaaagggagagatttggaacataggtaatagaatccgcagaataaaggttttgtaaatggtttggctcaattatctcatcaatagatcacgattaatatcgcaagattaatcaattccccatttgatttgaacctgagaaccatgctttctgatagcatgaaagagatactgtaaaaaaaaaaaaaaagcattacagtatttttctctgcatacattgttttcaatatagaacaagcagatgctagaattgctcaacaatgcaattgcaaatcacatactaaaacaaacagatattaataactttgtcttcaaattccgaagttaggcagacataacagcatccttaactatggttgataaaggaagcaatccgatggagcaatgaaacagcattgtcacaattcggatccttcaacaaatgaaacacgtgaccttctccttttgcctccataatctccacaacaccatgccacccacacttctcaagcaactccttgtaatacacccccctatccttcagcacatcattctccgcaacgcaaaccaacactctctcacaagcaagcttcaccaaattcggatcctttcccgggtttatcaacgggtcatcgcacctgggcgaggatgggcaaagaaaccgccacaaatcttccccaacatcaacatgttccgggttttgggcctcagagccaatcctctccacgccccaaaagtaaggatgcaccaaaacaactcctttaacggtaatacccggaatcgcatgggtcccgacccgaatacccatgtggtgtgcgatgttccctcccgcactgtcccctgcaaaaaacacgttcccgaaatcagcgtggcggttgagccactcatcaggaccgtttccgttgaaatgggccgcggcccatttcaaggaagcccatgaatcttcgtgagcgatgggaagagggtgctctggggctcttctgtagtgaacagagagaccaattacgttggctttggaaactattgagttgaggaatgtgtggtagggaagtgaaaaaggtgtgaatgtgcagaaggctccgccgtgaaagtaaaccaaaagagggagcttttgatttgggtcggtgactttgggaatgaagattctggctgatacgtcgtcgttttcggagatgacgacgtctttggagatgacgtttgttgcggggtcgtggcccagcggaacgacgtcgcagcctctgagtctctccacgcgaccgtctttgtagattttgagacggggtgacatatcaatggctacttcttccatggtgaagaaactgggttagtttctgtgatgcagagaaggaatttatataataagataaaatttaaatatttttggttggtgagaagattgtgactttcaacggttattaaagtgtctaaactagagatcttttggatgaggaagttatctgaaattgcgtcatgccctacgtgattttaatcagctgaatctaaataatattttattttagtgatcaacatctcagatttaaatcgaaaagtgttttgatcaagatggacgtaatcctagctgcaatcactgtgaaatctaataacactcgctaaagaatccttaattttaacttttcttttccttcaaacattaatgaagaactttatttactccctaatcttaatggtaatcatagttaaagaaccaataactcatttatatatatatatatacacttatttttcatttatttattttatcagttgtcatattttttaattatttttcttatatcttttatttccattttaatacatttaaaatgaagggtaacttttctatttcctctgcctcctctagagaacagtgaaaaattcgtggttcatgggtctcaaactgaatgtggaagtaacaaccaagatactgagaagttttataaagtccattgtaatcttaatatcgtatgtattttttatataacaacctaggctttttataaaaaggagtaaaagaaataagaatttatattataaaattctgtcgcaaaagtctaagtgacgaatttagcgacgaaattagcgacgattttagcgacggatctggtcctggcgcggttagcgtgagattggcgcgagtagcgccacaggttctgccagttggcgcagttaccgccacagatgctggaggttggcgcgattagcgccataatggcgcggttagcgccataagtgctccagaaagtctgtttttcattggaacttggcgcgggtagcgccatatatggcgtgattagcgcgggaacgtcggcagaaccagaatttaaaggccattttatgagattttggtccaaaagcatggtttcttcttccctcagcctccaacctccattgatgacttgccaagcttcctaggaccatgcaagatagccaaaacactttcctgatgacctttaatcttgagagaatcatctagaaagccataatccttcatttatttacttgaaaccccttgtgagtgagagttgggattctcaagagaaaccctcagagaactcgagaataggcgagacccaaggcaggagacagacaccagagctcaaggaagctgtcctgagatctcctgggtcgccactgaggtaaggaattcaagttctcttgggtctctgtgattttgggattttctgagttttgtgacccgtgctgagatggggctagaattagcccagggtccagttgagaaacttgtttaggacgatgaatagatgaaggaatagctttcagtttttgattctgatgattttggattttggctctgtgtggcctatgtggtctgtgttatggccacttgtactagtcatctgatataccagagccttatatatattgtctagagcctgtgtggctaatggaatggagtcttgagaaaggcttgaaccattccagtgacattgtgagttgttgaggctgatgagattatgccatgtttctgaggcattgaatctacattgattcagttttgatactcagcccagatggaccttgtatggtctgagagaagcctaataataggctaaacttgttttgaaccccaggataggggaattatgctatgtttgatctgtgattgatgcctgtggtcttgatattgatatgaaactacatgtgccttgattaggccgtgattctgagattattggtggcgggagccacagagcggggaccagaccacatagcgatattgttccaggtaagttcagtgtccctgggggttgattcctatcttgtatatcaccccacactcctggggagttgtggtcatgtcataatacatgcattgcatttgcgttctgatgatgatgacatatatgcctttgtgcttgatatatgctggttatatgctgaggtatgattgtattatggactgtgattgtgcttgagatagatctattggccaatagatagatatggacctccctaggagatggtttcctcctagtatggctggctcttgggtgatgatgatcccggggtgatgatgatcccctaggccaagggaatagttcagatggtttcctgctattctcggaggtaccatatatgtgcatccatgctaagggtagcacccgatgggatgacacaggtgtgagttccggcctcacactgggagatggtttcctcccattctaggagatggtttcctcctagtacaggagatggtttcctcctagtacaggagatggtttcctcctgttttaagatattgatataggagatggtttcctcctatttggtgactttattcctgggagatggtttcctccccattacaggagatggtttcctcctgctctgatatgtgtagtcaccttgtatgatatgctgtgtgattgagaaagtcagagggctagccaatgggccatttgattgtgatgtgtgtgcatatttattatgatagtgagccagggtggaggagattcctccatggatcctgagcttactgagatatgttatctcaccccgtgtggggttatgtggtttcaggtgaaccttctggaagagaagagcagtctcagggcaagaggcccatcagagactagactgcctagttgaggagcagcatggagagcttgaaggctccattttgatttgttttgttatagttttgtataccccttctgagggatgacattcttttgtagcaccgtgtgtggtgtgaacctgagatgtatatattgtacagaactttgatattatgtatatgagattttcccctgagtacatgtgtatgtttatattgttgttactctgcctaaaactctgttatctgtcttattatgttgattttgataaactggatcagcaggggggtgattttatagttctgttatgcgattccatacataatgtatcaagaaaacgatcctatgtttcctctaagccatttgattgatattttatacgctaatctgatattattaatgataacacgtcggagacctacgaggtgttacatttaatggtatcagagtcgtttcttgatgagaacattatgtatggaacttgttttggtgtctgtttgtgactgtttgacatgagcattacataggggtacattaactgtgggcctgatcaattcactgtgtgatgtacatgtgtagtgctatggtgagatctagaggcaccagtggggctaccagtgcccagcctgatccagttgcggctgcactagccgctatgcagcaggagttagctgctaatagacagatgcaggcagagatgcagcaagtgatggctgctaacagagagactcagggggagatgcagcgtgagatggctgccacccgaggggtgaatgaggccttgatgaaggccaaccaggacctgttagaggaggtgagaaacctcaggaggactgacagagcatcctccacacctcctgcaccagagggcgaggctagtcgtcagcaggcaggtgagagtcacctcagaggggaacaaatgacccagttagaggttgatagtgatgttgcagccagagggaagatgctgctcaccttcaggaagcatgaccctccagtattttcagggggctatgatccagtgactgcagcagggtggctgcaagccctagagaagattttttaggtcatggagtgccccgaccatcagaggttgctgtatgcgacctatatgcttcagggagacgcccataagtggtggaagaccactgttccacttctgagaggccggggagagacgatcacctggcagttgttcgaggcctgcttcctagacagatacttccccagagatgcacgggagcagaagcaggcggagtttgatacactcgtccaggggaccatgacggtggacgagtatctggcccagtttaatgagctggcccagtatgctcctgatcgagatatagtggaaggtttttgacatgccataaatgacctgatcggtgaatatcgggaaatacatgttatcatataataataaatggttctctcttacctagaaagacaagttaaatattacactttatttgaagtttttagattaggtcgtctctactaaaaggaatctttttttttttggggaataattttcattatgaaattcaataaaaaataatatttaatttaactaatattctaaggttataaattacccatgtgggttgataactcctcgataaatattgacatttgactgtgttttggcatgtcaaataatgaacttcaagatcccacatttccaataactatgccaaaatctaatgtcccatattgatcttgggtctatgtttagatgcataatgatgaaaattagttattagtttaattaactgatacctttatatatagatgagtggctttgcaaggaaaaattaatttgatacataactaagtaatatttctttttaaaccttccatttttagatattgcttgaatgagttttctaatctattctattatgcttaaatgaatactcttaagtgtgaatctcaattaccaaaaaaagaaggcataatagatatgagttacctccttccttatgcgagtttatcattgtttctttttgtttgaaaactttgttgtctgttttgagaagttaatataatttttgttgagtactgcacaacatttggtcatttgcatcataaaaataataatcattccatctttcttaaaatagtttggcagttcagagcaattcacgtagtcattaagtataattaattaaagctaatttctatgtgtaccaaaaaacgaaggtctatttggagtgtttctttccaagtacatagcgttttcaatagaacatattttcaagcagatgctagaattgctcaacatagataatcagtgtcagtgacatacactataccaaacagaaacttcagagtctcataaataacctcaagtaaaggaaggatgttactaactataacaagtaacaagtgcagacagacatatcacatagtaactcataactgtacccttaactatggttgataaatgaggcaactcgatcgagcaaggaaacagcattgtcacaatctggattcaacaaatgaaacacgtgtccctctccctttgcctctataacctccacaacaccgttccacccacacttctcgagcaactccttgtaataccaacccctatctttcagcaaatcattctcagcaacaaaaaccatcactctctcgcaagccaatttccccagatccggatccttctccgggttcatcaatggatcgtcggatccaaccgttgtcgggcatgttaaacgccacagattgtccacatgggcaacatactcgggtttttgggcctcggatccaactcgctccacgccccaaaagtaaggatgcaccaaaaccattcctttaaccttcacacccggacagggccgctccaacagaaaatcagttctaaagtaaaaatatgaagaaaaaaaattatctttaaagaaaatataatgagataccagaagcctcttagttaaatgttaacatatatgatattttttattttaaaaaaataataataatctcgaacataaatagcaaatttttcttatttttttctaaatataaacaaattttaattatttaatgaatcttttataatcaagatcaacagcactaagaaataacttttattagtgggtctaaaattcaaaactttgagtgttttacccttgattcgggtctgcgcccggaagtctgtgggccccgacccgaatacccatgtggtgtgcgatgttcgctccggcactgtccccaccgaaaaacactttcccgaaatctacgtggcggttgagccagtcttcggggccgtttccgttgaaatgggacgcgacccatttcaacgaagtccatgaatcttcgtgtgcgatgggaacagggtgctctggggctcttcggtaatgaacagagacgccgattacgttggcctttgaaacgattgagttgaggaacttgtggtaagtgggtgaatacggtgtctctatgcagaaagctccaccgtggaagtaaaggaaaagtgggagcttttgggttcgatcggtgagtttgggaatatagattctggccgatacgtcgttgtctttggatattacgatatctttagattcaacgtttgttgcggggtcgtgacccggcggaacgacgtcgcagcccatgaatctctcgacgtgaccgtctttgtagagtttgagaaggggtgagaaatcgacggctacttcgctggaggtggaatccatggtgagtgaagaaattaatgtgaagttttggttgtgggttagttcttgttgtgaggtagagaaggatatgcaattaatcatacaaacatgtgtagaataaatggcaaactttggttagtgagaagatcgtcacttccaaagtttcaatggctatgcctattaatgtaagtcaacagtcatgcacgtgacgtgcttcgacttctactttgtagacttgtaaagtataattatttcgaaatgtttataaattttattttattattataataataataatactattatattatacagtgtagaaatttccgttcgatgccgtcttggtcttgtatgtgtgactcgcgtaatgtctgatattgcgggcttgaaaagaaaaactgatgaagcttgtcctgttattgggttttgctgacctttgcaagtaatatattgctatcatcccttatttagttgtaataataataataataattatagcatatggatcttcacccatgattccatgaaaggtgttaacatttaatcattataggaattaagtaactaaatgtaataaaaagaaagaaggaaacatttatactttgaaaaaagaattgggaaagaaatatttcagttttgttaattattgctttaaggattttttttatataaaaaaagtctgatttatcagttgccaatttttgaagatctcctaatttggattttattcactcttggaattaaggtttctatttagctttcaatttagttgtttcagtgttggttgaagaaacaaatgatgcatgtctagtaatggtactttaatgtgtatagtcaatagaagtgatacctacaaaaactaatttatgaaattaatattttttaatactttaccttgatatgtgtgcattcagtggtatctatgaaacaaacttctttttgttttctttgtgaaaatttctaggaaggacttgccaggccagaaaaaaagaaataggtggagcaaaacagaaatacaacaggccccttgataattaagagatgttctagcagggtgaagctttaccagtaggcgtgggatatggcagtatgaatatatttagtcaaatgatgaggatactactgctagaaaggctggtggcaggattaggagtgtaatttaagaagggaggtaaattataatatagacttcttcaaagaaaatgaacaaattatagtcatgaacatttggtttaatgcaaagggggaaaatggcccatgtaatcctgagtaattttatatttttctggttttaaattttgttggtagctaggttgagaagataaaatttgtacagatgttatataataaaatatgcatttcacatgcgactaccattataaacttcagtgattcttttacttaccatgttaagatcttcatttggtctaacattttgacactttactggtttttgttaattaacgaaatttctaatagattaggtcattaatttatatgtgacaagcttgtacacaataaaatcccgaacagtagtttttttttttttttttgagaaannnnnnnnnnnnnnnnnnnnnnnnaaactgcagttagtgtctatgttattaacaggagtaagtaaacccctgaaaagtgccgaggtgaaaaaccgccgggaagttctgcgtgcattttcgagggttgcagtaaaccgtgggtaataaaaattgctgctaattattagtattgattcatgtattttaagtcagtctgcaaaagggctgaacatattttatgttttttttcctgtcccgtgaaattccttctaagtgacaactagttataatgcatgtgtaaactgtgtcaaccaaaagtgtaacttgttagttgttatgaattctgtagggggtggattaaacttagatgatgcatgatgcagaagtatacatttttgtttggctgttctgagttgatttgttactcgattaacctttcgggagagaaaacaatgcctcaccctaacttttaaacttgaatacattcattttccatctcaactttgttacattcattcacacttgaggtgttttgtctctgtttgtagcatataacccacgattaaacattaccttattactccaatgtccatgtctgcaaaggcaaagcacataatgtaacatataacccacgagaccacacgaggaaataaattaattagaggaaagaggactcattaatcatccataatatataaattaacaaaaacaaaacagaatataccatcgcatacttatatttaattcgtaatatgcaagtgaatcaaatctgatttcattgccaaaagttgtagtaaaatactaataattacaacaaatcaaacttaaactccaagtcccaaatttatttttaccatttccctccttttacttattcatcacggtattactcagcacgagccaaagaacagagaatcatacgttaaacaatcatcacaatcataagaggatttagtcagttggttgagtacaataataaactgtgttagttattgcaaattcatgtgatattgtatccaatttttacgaataaaaaaaactaagcatgccaaactagagttacaaaacataacaacaacctaaaaaatcagggtcccttcaattttaagaaatctagtcttgttggatgaaggtaacaatcttttgcaacatctcctttgccttctcatgttggggcttgaaaacatgaaagcagtgacccaaaccccaattctcaacaaggtcaacgctcccaccccacccactcttcttaagctcctcagcgtagttcctcccacactggaacaattcgtccttctcagccgcaaaaaccaacactttctcacacccaagccgagccagatcctctgcggccggtttcatcctaggatcctccgaaccctcattccccggacacatgtacatccacatctcatcgtccttcgtcacgcccgcgaaatacggatgcaccaaaaccgccccgacaaccctcgctcccggtaacccgaacttcccgacccgagttagcagtgtgtgggttatgttgccgccggcgctgtcgccggatatgaaaacacggtccaaatcggcgtggttgttgagccattgctcggatccgtttccagttgcgtgcgtcgcgacccacttgagcgcggcccaggaatcctcatagcaagcgggtatgggtcgggtcgggaacaacccgtattccacggagacggcgatagcgtttgcttcggctgcggcggtggcgacgaggttgtggtattctggggagaaggcggagtgcatgcagtacccgccgccgtggatgtagaaaaagatagggagttttcgggtcgggtctgaaattggaggtaaaaagatccgaacggaaaccggtgggtgggttgaaacgaccgcgtctttggagcgaacgccgatgattgggtcatcgaaaggggtaatcttttggatggtgggtttgtaaagctccactgtgccgtctttgtaaacgcggaaaaagcgaaacttgtgggttacctcgttctcttttgcggccattttttgttttttgttttttgtttttgatgcagcgtgaagtgagtttttgatggtgagagataggtttagtcattgcttatttatactagtagtttatactattcttcatttcttcttccatgtgccaacctatttccatttagaaattcaggaccaagaatgagaataaatcttagtttttctcccttatgagaactgcattaagtgccattaagtttggtttatgtataattttattatttaaaattttcaaatgatttaattttatatttcctatactagtaatgggccgagccgaataggtttcttttttttatattttgtttctaagaatccaagtcaactttaatgataagttgtttggatcagttcatccaaccaagctcaaattaccaacgttaattaaaaactgttaattttaagtataaaataacaagtaaaacagtacaataagagtcaaataacataggaccaatcaaccccttatacaagaaaatacaaaaattacatgttaaatgaaaatatataaagatttcaagtcaaaagtaaatccaagatacataaattttcgaagcaaattccactatcaacaccattacaattacttaaaaaaaaaaacaccattgcaattaaaatgagagagtcttatgtacacgcaaccgcatacttgacgtactattacatttcatcatttacaatttttttcctattatatcatttacacatttgggaaataaataaatcaggttcttactctagtctggtagtttcctaatatggtgaggtcctgaggggttttactttttcttacggacataaaagacaacataatactatagaaagaaacagaactgaagttcgaaaattatcatgtttcgtgcggtaatttcgtagcgctatcaatcgatcgactgtacaccatcaaaacatgttggtctcaaattctttagcttgcttaaatgcttgtttgcatctgatgattttctttcattcgattctctatttttaaattatttcatatagtacctgtttagtctattacgtatatatatatgtgtgtttttaaagaatgaatgactaaaacctttttattatttacagtgggttaagtacatcaaatggataaaaaattgacaaagtaaaaggacgatatatagagaagagagaaatactaaaagactacagtacaatttttaaataatgcatgaaaagaggaaattcgtaatatttagagaaattaaaaatttatttatgcctttccccttatttgcacaatcattttcaaatattgataaaattatatctgaatttgataaaaatgttgagcaaactcaatggtgctttgatttgaatttcatgctcttcaatttacattttttgttaagattaaagaatataaataataatacattgttcaatgcaaatctaaagttttacttaaaaattataattataatattggaattaagctccagtcaaaaaaaaatatcggaattaagttaaagagtatttaaatacatatgaaactccaaaattaataattttaattttaattctcaatatatttatattgaatatttaatcaaatattgtagcattttgaaaaatattaaattaaaatcaaatgaggaaatctcattcataacattttatttctaccaaaaaaatcataataaccttttatttgttgatagcttttcagaaatattcaacacctttaataaccattgggtaactaaatacatttttagaattagacgagcagctgtctcaaagaatttaatttagaataaggtattttcaaccgcaaacctagtagcatcatgcatgaagaaaaacaatcataaaatttaactaccatcatgaaccaaacttaactagcgttatcaacacccacaactagccagaagttatcataaaatttgccatgtgttccccgaatccaaccaattaagtaccagatttcctgtacagatgtgttggcctaaaacgtgtaaggcaggactccatcgttttctgagctacccatgttagctataatgtttgctcagtccattacattagacggtttaaatttggacccttgtattcactaaaaaataggaattggatccttcaaagtttaaaattcaacttcacttcaattttataacactccgaagaatcacactaatattccaagggtacaaattttttaaaaaacaaagttatgcattattttaatgaaaaaaaataatattttcaaggattcaggttaaaattttaaatgtagagaatcttgataattcatatgcacacaacaactttcaacactaatataaccgtttcttcacaaggataaacaatttttctcttaatttgtttcttcttgaaggttttctatctccactattcgatactcaatagctcgaagggtaagatatctgcaaaagatactctgacacacaaatcaaatctcagactatatgggtatttaatatatgtaaataatgtcttacgtcgatattctcatagtaatttatacaaattttagtgagccttaaacctatgtgtccttgcatatcattacaatattaggtaatgttcttataatcatcattaagggcttttcttatagccttaatagctttcataaaataatcatgctttgttgatgtttttaggtctttgaggtactcgaccttaccaagtacaaggtctagtactcgagtacttacaaaggaaggcacctttatgtaaaaaagtataaggattacttgggtactcgtttgggccaagtacctaagtatcttccaagaacagatctcttggcctatcagtagacacatgttacttgagtacttggttcagctgaatatttgtatactcttctagaacaagcttctagagatgggggatactagagtactcaacccaaccaagtacctatatgttgtaacatccctagttgttgacttcttggtggctctcacacaacgacacttcacacagtgacacttcactcaactgctagttggtcagaacgctccaccggtcagaaccctttgtaggtagtcctttttgagaccttaaaaattagctctgtctgttttcaggatcaatgactgacctcacaaaccaacacaagaattttcagcatgttttgttctcactcacacacttgtcgaaaaactttccagaaggtcacccatcccatgactacttcaagctaaacacactaaccaccgaaaaatataggtttcttttttttataggtaataccaattaatttttttaagtcatcctcaactatacagtctcatacttgcacagtctctggattcttctcattctagcgtaattcaactggagatgttacatatactcttctagatagggttggcaaagtgggccagcccaccaaaaaatggggcaagttggcccagcgggtcagggggggctagcccacttttgtaaagtgggctggaaatgctagcccgtccagcattaaggcgggccaacgggccagccagctaaaaataaaaaaaaataatttaaaaaaatacaaagttaattaggctcttctatccatactcatattagtacaatgcaggtaccataaccatatccacgcaacctagctagaggaattataataatgtagtagataatcaatcaaatttctaaaagcacataaacattaagcatttttgtaattaaaaaaaaataagcaaagtttgaaacttaaccaattaacatgagtaaaactactaacttaaggaacaaagaccaatcaaagcaacaaaatttgaacttttaagtttcttgaatttggtaataccaaagcaaacctgtaaagagagatgagaagcccaagcaatttcttgaataaaattcaataagctacatgagaacttgcacaaatttgtgaatccaacaagactatcaataaagaatagaaaattcagtataaaatgattttaagaagataagttgtacccactacatgactactccattgggaaggactcaagaccaagtctgacccaacaaatgacaaaacaccagagcccaaagcatccttttgcactaaacttggtctccatatgcttcaatgcatttaggaaaatatagaactccaaaacatatattaaatcatcaaaattaatagaaaaaaacatggcaaatgcaatgttactgatactagattaatgcattaaattaaagttagcaaagcaacatccatacatcaaatttaaaattttctaataacaagttagaaacattacaacttccaaaatgcaaaatgattaaattcaagaagtagttgcatctatctaagcatcttcaatacttattgtatttgatcccttggaaacagttggatccatatttaaagcacaaaagtcatcctcaccatcttcagctacaaattataatccaaaaataaaaaataaaattaggtaatatataatgatgatttaaaagaaaattaattggcaatttaaattgtaaaataataaaattaaagaaactaccattctcagcaaaatcatgcagccaactatgagtacaaattaaggcttggacattttctgacaagagacaatttctatacttgttaatgacatgtgatccaatgctaaaagtagatttagaagtcactgtagtaataggaatgttcaacacatcacgagccattatggataattctggaaagcgattataattatccctccaccattgcaaaacatccaacttttcatagtacacaaaatccaagtttggctcatcaagataaacatcaagttgtgactttccaactttagatgcaagttgattattatgcattttcaattcctattacacttgacaagttgaacacacacaaaaaaaaaatcaatcaagtacacaacacaaaaaagtaaatacttacataataacataattttagtagttaataagcatgtacttacaccaaatattctttgatttattcccttgagttcctttgacatggttgaagaaacagtctggggtctggggtcttgggtcaagattctgaatagagatagcattattaatgtttcttgagtttgaatacctctcaaagagcatgtgtaactttgtccgcacatgttgaatcttttcctcacaagtagattcatcaattattgagtaacaataactcaatgaagtaaacttaatatgtgagtcaagaactgctccaaatgcaagattgtgaatcaaaagatgatgaaccaaaagaagaacaaaggaaagaagggtctatttatgaatcaacatatgtgaaaaggaatcaagttgggtgcagatgtgtggtggacaatactagtgggagttttttggatgtattcgctgagtgggtgagattttttttttgttcaattaaacaatgagaatcttctatgtagtcttttgatggagtccaaagtaccaaacattgtttgttactacttttttgactagacaatggttataatattatgtgattattaaagattatctaaatcaatattaaactttgttttctatattttacataaactttgttgtttcattcaatacacgaataaatgctttactgtcttttttataggaaaactttactcaagtatttaaaaatgatttaatgtaaaactaaattaatactatgttaaactaaagtatttacaggaactctttaaagggaatgttgtaatttgtataattaaaaatgaagtatgcaaaactccattaatgaccaaaaaatgaagtatttgaatatgaagtatgtaaaactccattaatacgaaagaacaacatcaacccattacgttcaacatttacaatgaaaatcaatgctcctaaaatggacaaacacatcaccaaaagacccatcaacaaatacacattccttctttcactaacaattttcttttgaaatttaataatcttcctttgagccccctttaattgttgatcctattgttatgtcctacgaaatgtgccttggcttggatcaacaacaaccacttcccttccatcaacacttgctcctctaacattgacaggaccctcaacccagtcaaaaatgttgcaggtacttggactctaaaaatgttgaggatcatgaaaaacataaaaaggtaaaatgaacatggggaacaaaaaaaggcaacaattagagcacttatcgtccaattccgacatctccaaaaatgtctttctgggttgtcgacgctccttgaagtcaacaacaacatgggtagtgtgcacgtacactcgtctttcatcacaaatgaagaaaacgacaaacttggaccaccccatcgtcgacgagctccaaatctatccattggcaggtcattgtgtggatgaagctttacaagagaaaagatgaagctcgaagaggttgaagaagatgaaggtggagaagatggacaaaaacaacacattttagatgtcccttgtgcaatatgtcccttttattataaaacgttttaaaaaattgccatgtaggtttagataacccaagtctagctctggaccaaaaaacaacatattttaattttgtgacgacgaaaaaacgtattcaaaattttgcagggatgaattttgaatttttccatatttataggaattggaaaaatattttagcctatttttaaaaatattattgaattgtttttcattatttaaaatactggaataaagagtgaaggaaaaagaggattcctttgctattgttttatgttgtcaatgcgtcaaaagttcggaccctcaagagtctaaaaatctattttaagttatgggctaaaagtttataatttccaattacaaaatagaattaaaaataacaaaaagcataaaatatggtcgcgctcgctcacactgcgtgatcatggtcatggggatgtgatcttctaaaaaatgctatttagcctccagcactaattttgatcatatgatcacaccccatgatcttctttacaaactatagcaaacctttcttgtttttaactttgtttaattttgctgctctctctccatgcttatgatatttataaatgttataattaattaataaaataatataattccgacagctaggatgggggaatcgtggttcaccattttcaagaataatgatcactgatcaattttaagtttttcacagtggcaatactgatactgcagacggcagcttctggactaaacaataatcaatattcaataatggactgtgtgcgcatcactttcgtctttctgcagcctgtgcataattttgtttacatcccccaattcttccattttaatttctttttcttcatagtaacttttgtagttatatacttctggagtatttttttcttctacttaacttatgacctttttgttttttcttttgctaatacctttttccctcccttttaattaccaataataagctaataatgatattttaatgagcgcaaaacaatatttttagtttgtgctcattaacctatttcaaatcgaaggtatatttaagattgtaacgtaagtttttttttttctttctttttttacagaagtaacttaaggtttttttaagcacaatattgttcacacatttaaatacaaggtattaattaagaaattaaaaaatatttttaacaataaatatgctaatttttagtattgttagttttgattaacaaggagattccaacatgtcatttttttttctttcacttctcttttcattattagaacaatcttatatctttgtaagtttttttaagtttaaatatgtttaaagtctcatgatcaaattttattttaaatttctagtaaaaaaatttagtcctaagtctctaatatattcaaacttttgttttaagtctctttccttaaaaatcataataaaatatttaataaaaagttgacttaaatatgtttaaggtctataaaaaattattacattttattctaaatttttaataatttttttgttattttgaatctttcatatattaaaatttttgttttgagtctcaatcatcaattaagtgatgacatcacactatcataatcattaatattgtttaaaaaaatcaatttataaagtgatacatcattatataattgatggttgagactcaaaataaaaatttcaatatatcaaatatttaaaacaaaaaaaattattaaagacttagaataaaatttaatcatttattatatgaattttaaatatagacttagaataaaatttaatcatttattatatgaattttaaatatatttaagctaaattttattaaatattttattgtgatttttaatgtatatcttttaacgtgaaggcttcacacaagccatgaatcgttctatgaggatatacaattctatagtctcgagcttagaaggcaaaaatgctcaagaccgatcatgagttgttcgggtacaaatttcattttattattcttcatatattttaaagttgcaaggcgcaacatgcagattgtgatattatacaaacttcatagaacaaggaaagtcatgttaatagtaagatatttaagtactaattcacacgagtttctaaattcaatccttagtatggtgactataaaaaaaggtgcaaatgcaaacttcagtgaacgaaaatcctgagttcgtagtttatgtaaatcaacaagacaacaagggttccaaagttaaagaaaaactcgcgtagggaaagaaattaaagtggatggtgattaattcagacgaaaagaaaaagcaaaactacagaacattatcgattgtcatcattaaaaactgataaagtaattaatggccatgaaaaaaaaagcagataaaacatatggttggtttgattgaatacaaagaaacttggcatttatctcactaattgaaaggtcgataagtcaataaatcaacatggacaataataattcatccttgagctatctttttggctacattcaccaatgatcgagtaatgggatacctaaccctagattattttttattgacaattatacaagttaattttcattttaaaatttgatcaataattgatttatatttatactccaaattttcatttaacatatatattaacgatttataaaaaatttagaacaagagaaattccttctttattcactttaaaaaaatcaatgtcctacaaagtaacacgatggttagttggttacgtattcggtattccctaccaaattaatctcatttttacttaaggtttatttggcaagaaagaaagtgaaaaaaaaatatgattaataaaatattttcttttcttcttttaaaagaaaataaacaaaaaatatttttataaatataaaaatttaatttttttttcttttcttattttccttccatccaattaaacataccattatcattacatgctaattgttatgatagcttatttggaaaaactaacatggataataattatttctccaaagtcaagaaacaaatgtcaatacttataaagttcaaacacgtttattaataacccgtacgtttaaaagactgcacctgacacgtgggtgtgaaatcgataaaattgtcaactttgtgatttaaaattttctccataacaatactctaggtgatcccgattataaaaaaaaaaaaaatcatacttattaaaaaattagttaagtgtagagatgtggtggatctatggattgcaaacgaagtcacgatgatgtcgttttaagcggcattgtagcgcactcataatgatgtcgtttctctttggtcgtactcaaattcttcttactccgaacgatactcgaaaaaatgaaactcttccaaaacgaagagaaagtatggcatcacaaaaatgcagtatttatgtttatctgaaagcaacggtctaagattagaagcctcaaatcatttcgttcttcacgagaccgaaaaataatttaaaaaatataaaaaggaagagaaaacagaaaagaaaagaaaaaactcagtgtcacgcacacccctcatcaccgaatcccttttgctttttccttcagaaaaacgatatttttcctgggtcgttgctggttgcagcaatgagagctgaaacataagctttagaattgaaaaaacggagaaagaaattcaaaagggtatccgaaaaatgccttttcatccgtattccttttgagctcgtcaacaatggctgatgatctctcttccttcgccaaggtaagtttttatatatatatttttttacctttcaaatgtgccatgttgtcttgttccttcaagtctctcaaaatatggggtagaaaattctagttttgattttgttttaacatggggtggcacgtgaaattgtccgatctggttcctcaaaataaccccaacgaatatgtgtgtttttgaggtcaatgggtatttggcatttgattgggtagcttccttgagatgtagattctgtggggtttcaacatattcatgtgctggatcaacttgtttttatgtgttttgttatataaatataaaaatcgatttgaaatctgtggttacaggatgctttgcttgtgaagggtttgaagagttccactttggtgtggaggcttgttgttttgacccttgcgatggtatgtggcgtttatatatgttcaatttgtctgaagcagataggcactagcagcaagattggttttctagatatcaaggttgttcaaaagccatgtccagaacctaatattgaaccttgggagattccttatgtgcactaccctaaccccaaaacttacagcaggtgaaattataatatactgctgcttaaatttaaggttatttttgcagaatctgtttgaattttactgatattgcttcatttggtatgtctttgttagggcggaatgcgcttgccaccctgtgcgctattttgctattttgtcaatgcagagatctgggagtggatggtttgagacgtttttgaacagtcacgctaacataagctcgaatggagaaatcttttcggttaaggtgagaaggagtaacatttcaacaataacagagactctggatacaatttataatctagactggctaagtagtgcttcgaaaaatgagtgcaccactgctgttggtttgaaatggatgcttaatcaggtaaagtttgtttttatttacgttatggatgaccttttattttaataaatatttatcttacctgacagtcatttttgtatccctttcgctttctgacaacagtcgttttttgtttttgtgtcaaaagggctgttagagttaatatacaatttggtccttgaaggtgacaacttgtgttgcttgagtcccataatatgcacatctatagtaataggtctccaaaagggtcaacttgcttacaattttcccctatcaagttgtcaacatgtaaacaattttcatccctcaaagtactaatttgtatattatatgaatatattaaaaaattcaagcaacccaagttgtcattttgaaggaccaaactgtatattaactccatgtcgttattagttattttcaataaagctatggttgcctacctagattggtgacttccccttgttcctcttagacaaactgctgccttgttgggggtgatctagctaaactaaactagtgtgcagtaagaaggtttattgtgtaaaagtaatgaacattatgatgcaggcccaattcaaaattatactcacagctaaaagagaaacacactttattaaactgaaaatgtaacagtaatgaaagaaacaacaaaatgtcgaggatgacaaagaaacaaaataagactacaagaagctaatgattgctactccttgcccaagccaaaaggtcgaaccataaaccagagtatttttctccattccccctcaattcatgttcctcccattttcataatcaccttcctcctttccttgctattggaccccacaccttttccactaagcataaccgtctctccacgtgtccctcttttcgtttcttcgaatataccttccatatcttagggctatggttaagctgctgctgtatcaggccctgtagtctcatcaattttaaattatttacttggaataagtctaatgaaatatggaattggaaactttaatttagagtaacactatctttaaatggtggtaaaaaaacttgtgggatatgggagacttgctcttacttttattgagtatcaggtattgaggattttgccaggtgaagtctagcttttagatatcattttgttagttatcatctatgcaagaaattcaagaaatgggatgggtattttatgtttgatttccctgtgttgtgttttcggtgcaacttccggaaaggaaacttacaaaatttgtaatggatttaatgaagaataatatgatgatttggaatgcaattcattacttgcttgtgcctgctagaacctatcagtatctttcaaactagtagttgactgatgtatctattgacttatatggaattgagagggaggtgattcattttcacggtctaaactgttgcttatgagagatgaaggcatgtgtttgccattgtttttaaaggatcacagaactatgttataagggagaagaaggatcaactctctcgtcactcagacatgagttatgctgtacaatatgaaagcatgtacttgtttttgatgttgtttactgcatatcatttttctatttgttcttatcaagctgttgctgttataaaggatcagctcaggttgtctggcagagtttttcagtgccaattttacttctggtatttgccatgttttttattactgcttcctagatgatttgtgtgtatttacaaatgtggacataacgtttgttgatgaaggttcaatgaagattggtgttcttttctgtagttgaatgcttttgcataagatggatggttctgagagtttctttgaaagttggtagaaagctctagagtatataaatcattctacagccacattagaagaaagtataacagtagaacttggttaagaattaagttcaaacttatctcttgtgtagttgcttattaagttcctaaaaatgtagaagttccttaatgcaaaattgattttcaaataagcacatatatttgaaaacatatgataagtattgtccatgttcgtcagcaaagtttggtgaacacaattttcttatgtttaatcaatctctactgataccttttcacttactcaactattgtatgtgtgttgcccattctttgtaaaggacacttgataatgcaaaattaaattttaatatacgaggctagttcatgtggttacctatatttgtcttttctttcttgcaattgttaagaaatttttggtatataaacaggactaataccaggaaaacaaaaaacaacctagaaagtagaaacaagcctatcaaaagcctccccagcaatataatgcatttatttattttgtacataccgaacaatatctaacatgtaagttttgacttttttaatcgtataaggacccgaggatatcacataatcacaatatccgtacttcaatgcagggattgatgcagcatcatgaacaaatttcagagtacttcagaatacatggtgtttcgctcatatttcttttcagaaggaatcttttgcgccggatggtttctgtacttgcaaatgaatatgataggaatgctaagatgttaaatgggactcacaaatctcatgttcattcacccaaggaggtctttatttttcttctttgtgcatgtgtacttgtttgagtttgaatgttcatggttgaacatttgcatgagtgcttcattgtgatgcaagatgctcaagttagttgatgtattatcctactaaagacagttaaaaacaactcatgttactggattctgactatgctttcaggcagaaatacttgcaaaatacaagcccacaatcaattcaacattgctgattgcgcaacttaaacaagtgaatgaaaccaccgccatagctttggaatatttcaagagcactcggcacattctcctgtactatgaagatgtcgtcaagaaccgcactgtaagtcacactacctgttgttgcatgatgtatgcttcatcttatgccttaaagggatcttggcatttcaattgtctcttttgttttcagaaattaagggacgttcaggattttctaagggttcctcaaatgaagttaaagagtcgtcaagtgaagatacacaaagggtccttatctagccaggttgagaattggaatgatataagcaaggcactaacaggaacaccatatgagagtttcattcatgaagattatcgtaggtaaactggtgggtatgtacatacaccacgttttgccttttcccctttttttcccttttaacatccctctaatcttttgttcacaagtcactactgcaccaacaggacatacaatcaccctgttgaaattttggccgcggccctctctctcatttttgtactcagttcatgtcgttattttttttgtcttccctaatcaattgatatttaattcattctttgtactcgtgcaactaccatgttgttttgtagtaacactttgtattggggcatcaaggaaatttgcaatttcaactgcaagatatatatttttagatctaattgtaaattgttttttttnnnnnnnnnnnnnnnnnnnnnnnnnnnnnnnnnnnnnnnnnnnnnnnnnnnatatcttcataagtttcgatcttttgaatcaattatgatggtgaattgagatatcttcataagtttcgatattttgaatcaattgtgagactaattctcgatattagacttagtctcatttaaagttcatcattcttttgcaagagtgtattatgtaagaattgaattcagatcttctctcacaaattcaatcaatatattatctattgagttacattcattgggtgtaaattatttcctatgattgacctatataggcatttaaaaaatgagttgaaaaaaagtgagtctacttgttaaaattgtcaaaggagaacacaaatgtcttttaaagtaattgaagggtatatcattaaaactacttgcaatttgttcaacgtttatcactgttcttagattaatggtagtgttatatgtttagctgctaacagctggacctgaaaaaatttaggtgggcacacgctaccacgtgttttttattatgtactataattatttatgtactgaatttcaaacagtctggtactttggtcatgaccacgttaaacaaagaacagaatcagtgagttgtactgtagtatctagcagaaatcgcggtgtagtctatgggctatcatattcggctatttcgtgcagggattttgtgcatgatagtcgacagaaaagttgacctaaaaaagaaaaagtcgtcagaaaaatcttgtcaaaaacggtgtggagtgagtgggtttggtaagacaaataagatactattttttatattacagtataaaaaatataaaatcatcaaaattacaataaatttgagtatctcatttgatccatggggttaaaaggtctcgttctgtttatacatgaaaaataatttgtattcgattttttttgtgtaacttcttttaattaacgatagatacttattgtaaataaaattaatttttaaactaatgagttaagagacaccatgatgtataaccaaggattcattttttttttttatgtatatcatttcattccataatagttttaaaatcagaataaaattaaatgtttactatattaacttttaagatgataaattatttgaaataagctaaaaaattaaactagtcaaatttccgcgtcaggggggaagcacctaactaaaaggctaaaagtcaaaaatttgcttccagaagtacgaagttgactggcaaaacgtgacacggtggcttcaatatctctcacaggttttgacctgatctcgttcttaaacatcatgcaaatatatgcaaatgcaacgttccaagtcaccaccaaacgcaactactgcttttttaaaaacatggattatagtcattgcaataagatttagaaccaaggcacccttagaattgaattaaatgatgcaaattgaacatttgaacccttaaatcagagccactttataaactttttgataaaagcaagttgtatttatgcgtcatcattcatcaataaggatctatcaattaatgtattcctgtggaataatattattataaccagacaatattttgaactggagccgaagttgttttgtatcaagcttttcgtttggaatgtagccaatgaattgtgtgaagtaggatgaagagtgaagtcgacgtactaagcatacttaaatttatttaattaattaaattttgtgaacaaccttcatatctttcattgtttttaatagaattatattcagctttttttctttctgagttgagttatattcagctatccatatttgaatttgagcttaagttttattatattactatttaacaaggggataaaaatcttagcaatctacatgttgtatcatgtatgagatagacacgtgttttgtttgttaataaaaatacatcctaatttgtttttttagaatttaaatttagtttttcaggcaaagaatttaaatttaattagaatgcattataaatattttttttatgttatcatctaattataaaatgttgtatgcggtaagattattaaattttgtactataaatttatttttcatgtactatcaatttattttgtttttacaattaatatcaactaactataaattatttaggtatgactattaaaattatcacaaaaggtcaattatcttattatataagatagtttagtgatggtaaaatacatttacagtactattagatcaattcattctaattaaattattgttatagttaaattaagagtttatttttcaaatatttttttttcgtgacaaactaattgaaaatctccttatatatatatatgactttttaaggaatttacaaaagctaataattttaccataaatgataaaagtgtttcataaatcactctagtaacttaattataagctattttgattagcttataaactagtttagtaaaaatatataatagatgattgtgttaaaaactttaagtaagtgttttctacnnnnnnnnnnnnnnnnnnnnnnnnnnnnnnnnnnnnnnnnnnnnnnnnnnnnnnnnnnnnnnnnnnnnnnnnnnnnnnnnnnnnnnnnnnnnnnnnnnnnnnnnnnnnnnnnnnnnnnnnnnnnnnnnnnnnnnnttagtaaaaatatataatagatgattgtgttaaaaactttaagtaagtgttttctaattaagattttactttttttttaagaaattaagattttacttaaaaagacatatgaaggtgatataattagttaccaatataaaaatatgaaaatcaaattcttaaaatattctttcaagaaagagagttgagttagtatttaacttcgttccgactggtttgttagaaaaataaataaataaaagattcaacaacgtaaaagtacttctttcatctcgtttggacttcaaaagtattgtgagataaaacaaaacaaaagagaaaattacaaaatagaagtctaaatatttgttatacgataaactaattagagggtgaacttttgtaacagccacagcacaaacaaaaagtcaaatatactcatcaacttaatcaaaccttattaacatcgactaattagaggaaccagcaagttcaatgagatttgtagttagtacaatcccctgtttcacctctaaaattacttgcgttgtacattaatcactaaacagtgaataaacaaaagtgttatgattcaactatttatattatgtttcccagtttatatgtcttttaatatatatcaaacacagttacaattcaaagaagttacatgttttgtcactgtcttagtattttacacaattagaattgtgagactaaactttaaattaaaaataatgattaagtaaactatttctcatagtattggtcatatatcctaagattcagacctttgacattgatggttttgttaaacctctaccaataatgacgactttattagaatttgaatccatgtaaaatttgtcttagagtttagtaaatcaaatcacttcctccatggttgaccatgttgagatcaaccacttgcccgaagaaaccaatccaagtaccgacatttcttattcttaaaaacattgtaaataaatattactctctctttattaattttttataaagaaaacggaggattaataattaatacaattttttcaaaaaaattaatactatttaatactttttttcagcatcatttaatttttattaaaacaactatattgaaaaagaaaccgactagtcaatcttaactgtatacacgcacatggggtggcaaacatgaataatttattaaaatctaatttaaattaggaaattacataattatcttataaatattgacaataattacttatataaataggatttagaaccttaagtaattcatttaaagcttattaaagaatatcattgaaccgcgtaattagatctgaccatacaaaatgtcacaataaaaagatctgaccataaaatataacttgcccttaacgttaactccataaaaagaatactaatgtcatctaacaaattttattttacctcaacatcattaacaatgtatttggattaagtgattaaaccaataaatataattcaataacaaatataattcaattgacaatatacactaaatttaaagaaaaaaaaaactcaaagagtttttaatgcgggtgtcataatatttcactctgaatgcaaaagttagtgagggctgtttttttttttacaagggtttttacgtctaacaatttaaaccaaacaaacacgtattttttctgttccctgttataagattttttttaccttatttatgttacttaaaaaaaaatacttagtttagttaatcatattaaaattttcaattacttatattacatttaaaaattattttttaatcttttcattcacttaattatttctcataatatttggagataaaaatatataagaaaaataattaatatatctaaaaattagaaaaaatcttataaaaaagaataaataatttttgagaaaagtcttataattaggaagaaataaaataataaattacaacgataattgtcatattaaagagatttgctataaacaaaattggaaaaaaaatcaataaaatagtaatcgtgaataaaaataatgagtggcagtgggaagggttaaggcaagtgggaagagaagagcagggttagcgagagccgttgatgcagtgaggtgggtcccagagcagaagaagagatagtcacggacggcgaaggaaggaagggttgcaatttgcaaacttgcaaagaaggtttttatttttttagttgtttacgcttttaccccccagatccaacccatttgcgtagttgtgtcgacgacacacacacttgcgtttttgagcagtgtggtggcgtgtgtcgcgttcccttattataaaagaccaaccctaccaatttgcgcccttctctttgctctttttctctttctctcttcgcctggtcttggcatctccgcagcagcagaaccaccaccaccaccaccaccaccaccaccaccctgcttagaccaggtcctctctctctttagagaggaagagaaaaaagaaaaaacaaactaacattaagcttttaatagtaagacatggctcaacccagttccaacggggatctgaataataatcagcagcagggtcaggttcagcaacaacagcagcagggtcagtgggcggcggcggcgcagccgcatcagtatcagcagcaatggatggctatgcaatacccggccaccgccatggccatgatgcagcagcagatgatgctgtacccgcagcattacatgccctatgctcaccctcattacccgccgccgccgcctcctccctcctcccaccaccaccaccacaaacaggccgcggcctcctccgacgagatcaggaccgtctggctcggcgacctccaccattggatggacgagaactacctccacaactgctttgctcacaccggcgaggtacctttcaaattctgatactttttcgataagatgcgaattagcatgattaattttaccagcttgaatgtgtgtttttttagtttgaataagcttgatttgttactggaagttacttctcatgactaattaccggttacttagggtagcatcttaaattccttgatctctctttttttttgtgtgtgtgatttgggttttgatgaactgaaattgatggtataataaactaagttttctgtttcaaatttctatccttgggattgcgaatcgaaggaggcagtacttttggcggcctaagtggtcccctaatctgggttcagcactgttgacctaattttcatcaaattaatacattcaagatctcttaattgtacactggaaaaaagcggctcataaaacctgtcctttttttttttttttttagttttanagggttcagcactgttgacctaattttcatcaaattaatacattcaagatctcttaattgtaccctggaaaaaagcggctcataaaacctgtccttttttttttttagttttagtctctctctttttttttataaaatatttgcatcttgaagatccctcgttgacaatcagccgattcaatttacgggcatttgtgaagtttgaacctttttgcttgtgatcttccatgttagtgcattgctttttgatgatgtgttgccttatatgcaggttgtttcggccaaggtcattcggaataagcaaactggtcagtccgagggatatggattcgtggagttctattcgcgagggacggctgagaaagtcttgcagaactataatggcacaatgatgcccaatacagatcaggcattccgtctgaattgggccacattcagtgccggggaaaggcgttcctctgatgctacttcggatctctctatatttgtgggggacttggccattgatgttaccgatgctatgctgcaggatacttttgctggccgatattcgtctattaagggagcaaaagttgtcattgattctaatactggccgctcgaaaggctatggttttgttaggtttggtgatgaaaatgagagaacgagagcaatgactgaaatgaatggcgtttattgttctagtaggcccatgcgaataggtgttgcaactcccaagaaaacttatggctaccaacaacaatattcttctcaaggtttgtcatttgtaattcttattgtgaattcttgtgaagtagtttattcgattatgctatcttaatgttcagtttgtaatttattagtgccacttaaaccagcatccatcttttattctgcgtctgcctctaatctttactgttaactgaaaggaaatccctaattttttcttgtttcagcttgaaggggatttcttttttgttttttgttgacagttgctcattgcagattatacataaattaactgacaggcttttgctctttgtttctattcccctgcccatttcatgttagccaatgctaagtgacaagtctgttgtttctcacccacttcaattatcattgaatttcaattggtagatatatttttacaatttagaaacttgaatccagaataaggtagtaatattcattgttcattgtttaaaaatgtatatattgccaggcttgcttatgtttaacaacaccagaaggttctcactggaatgaattatatcatttatcatgcttccaattagaaacctcaaaatctgatcttttatttctttaaactagctgtggtattggctgggggacactcagctaatggtgctgtggcccaaggttcccattctgaaggggatttaaacaacactactgtgagtctgattttgtaattttttgcacatgttaatcaccttgctttgttcacatctcagtaactgatctctgttgtagatatttgttggagggcttgattctgataccagtgatgaggatctcagacaaccatttttgcaatttggtgaggttgtctctgtgaaaattccagttggtaaagggtgtggatttgttcaatttgcagacaggtactttacgcttgtagtatctcttaaaacaatgtcatagattataattttcatgctagtgaaaccgcttcccctctgctgtgtagtgggtggtttcctgtgaaatgggaagtggcatttgtattcttatgatgggtaaggatagggatccttggatatgccaacttgtgcttttgaaatcatctaaaagtttgtttggataaacttctacataaacacttgtaggagaagtgtatttcatttttccttattctcttctcctataagaagtttatccaaataggccctaaggatcatcatggtagtagaatcaggattcaaattgtgaatcagaatcccattttctgaattgcgaattgaatcgtatcgtgaattttaagtttcataataaacatagaatatgcaactaacaaagacattaaagcacatattcacgatcaataacttaaaataactctaggaggagcatgagatgcatgagtttggttaaaatttgttataatagaataacgttaaaatttataataaatattttgctattaaattgatttgaaaatctataacagaatttacaatgttttattatagattttatgagaaaaaggtattaaacagtaattgatataaaaataattatcacatcaattaaatattttttattcgatattagacaatacttaaatatcatgtcaatagttaaaagttaaaactgatgatccaaagttgaaacacagtctatgtgttgcaactaaaacacaaaagttgctaaagtaaaaaaaaaatgccatttagggttagggttgtgaattcggtcatctctcttctatgatgaccacagctagatacaagtgcagccatgggcagaacagaagttagaactggattgtgcgatttgcctgctctggctaccattggaggagcgctgctccagctgtgacagtccttggaggagtggcagggtgctgcaactccttctgaggccacatagaacctatgcaagaatcatgtgattcttctcgaggtcacgattcaggttcaattcatgtgattcgtgatgcgattcaagcaccaaaacgatttgctcgctgattcctattgccagctacttgaatcatatcgaattgtgtgtatcctatcatgaattgtacgatactaataacactgctgctaaggatacatatgtattcttatgatgggtaaggaatccttgaatatgccaacttctaatgcatttgaaatcatctgaggatacaaatatcttataaagtttctgaggaccagtacatataattttttaattatgattgccattgccaacataaataatgctgtcttatttttggtttctgagtgaattaactatgttttctgctacatgctgtctctgtaacagaaagaatgctgaggaagcaattcaggcattgaatgggacagtaattgggaagcagacagtgcgtctttcttggggtcgcagtccaggaaataagcatgtgagtttgtttttgtggtttcacttaattgtttaatactatattttacttacctttggctatataacgggaaaattgcttgtatggcattctctttttagcattattttttaaaatctatatttagattttgaaggcgccaaaatgaaatctcgcattattcaagtgaagaaaaagtgccatttctaataaaatttctaatttcattattgaaatccaactctaatttaatttcttgggatgatgcagtggagatctgattccaatggaggccattatggtggtcatcagggttatggtggccatggatttgctgtgagacagaatcaggatatagccatgcaacctgctgctgcaattcaaggtgcttcctaacggggcttattagcagaactgtgtgttgaagtaggatggattttattgctctcccctaaactgtagtattatttttaaatttgtagctgggttaaggtatgcaaggttcttaagattgtattaaaatgtctgaaattttggattgaacctgaccatatataatatgattcgggtatttttgttttttttttaaaccctcaaaacacattggtagcagcagctaagattattttaaatacttgtctttacagtacaatgttactgcttgcaaaaactccatagaggctgaatctgaaaactgatgttaattcctagtttctcactgacatctatgaatacgatgacaatgtatataattatgaaataatttaaatcatttttttggaaggagaaataatttaaatcatagtttgacataaaagacaataaaaattatttttggtaaaaataacaactgtgtatgctgcttaagcggtagaaaaaaatggaagtattttcctattattttcgacaattaacaatgatatttatgaaagttcacttttctattttgagctctatggggttttgacctcattaagttgggggtagcatgtaccttataaaggtttggtatgacattagagttttttcctgtttcaatatattttcattcaatccataattgtattcttttatggaagtccattttcccattttgagctctatctgagagagagagagagagagaggggggggggnnnnnnnnnnttaagtttgcttatacaataattcttaatcataaaacattaaaaatattttatacaaacctagtatagcacggcggagcgaagcggagccgacccgtgcgtatgcgcatgggtccaaaatactagtttttggtaaaaagaacaactgtgtatgctgcttaagcggtagaaaaaaatggaagtattttccttttattttcgacaattaacaatgatatttatgaaagttcacttttgtattttgagctctatggggttttgacatcattaagtcgggggtagcatgtaccttataaagttttggtatgatattagagttttttccggtttcaatatattttcattcaatccataattgtattcttttatggaagtccatttttccgttttgagctctatggtgttattacctcattaagctttgagagaggggggtaggggtaggatatatctttcttaaagttttgctgtgatattagagtcgtttgatcttcgtatggatgaagaaagcattgattccattgaaaaaggttacgaggaaaacaactaaattcatgacattcgtgtagtgacgaagatactttcagaagagggactgtcatagacaatgagatcagttctccttaaaacaagtgtcttacgcacaacgatgaaatccacgcctcattcacttctttattcatccccaccacttagatcttgtgtttagtaccattaatgtcaagatttctagccaatgaaaccttcaaattcggctggaacaactggaccaacaagcatggggcaagaatgtttgctaaggttgccatgaaaccgaacgcaacacaattatagaaggacaatgatggggatcttgattgtgatggagagatacttggccatcttggatctacgtttctattaaggctagtagtgaatgaatacaagtttgaccacaagccaagagtggtgtcattactacaaaaggttacacctaaagcctctttgatgctgactccatgacgaacaacaaagtcccttgttcaataattgagattgacacctttcatccaccctttaatctacttgttcatttggtggtcaaatctaataccttggttctttgctcgaacttccaaaattctccactccttggtttgacatgtttgagatgaagaaagtgaaatgtggtagtcaaaaaggtgcaagatcttgtgctagtgacaggttaagacatccacatgaacttgagttaaaggaagcattcaccaagggaagtataacacctggctcaatatacactccgttttattgaatgagaataacatcttaattcaattcaattgtactttgaatttggaattcacaacaacttgtgggtcatgcaataattcaattctgatcccagcaataaaatgcagagacaacaccatgtgaatgatggtgttggacccaagaattggatcaacatatttctaatttcatgaatgaatatcacatatgctattctggctagattggcttttatggtgttaataggcggaacttcaaatttgggcaatcggcaatggtcattccaagatgtctttgctacttcacattgtccttttcatgttattaccggtgcataaaaattgcagatataatcctggtgcagtttagtgtcttcacaagctggtttcattttgtgttcacatgctatgtttttttttttatgcttccagcatctatagtttgtatccagtcgtttaccgtgaccatggatcttggtattcggatgagctaagtggttagtctatcaactagatggatagggaagttagctttagtttattatgattatttagttagttctatactcttataatcaacattgtgtgatttgatttaatgaaaattgtatccctaaattttgttaggaaaaaccaactcattaaatagaattttgtacttcaacagattagtatcttcttcttaaaaaaaatacaacttttgcttaaaaatatttctaatttataaaataaagcgttcatttaatgttctttttttgtaattaagatattgaatatctttatttttttactaaatattttttatggtgttactctatgaaaaatgtaggaaaaagatgataataagtggacaaagttgatgagatattgatattttacaattgaatgtagaggctatgaacaacacacttaaggctctcgataaactattaatggaatagtactttctttattcctttttattcttcctttttaaaagatagccatacataaaaaatgtatttaatatccctatttatattatctttttcaagtttttaatagaactttcatcattatttctctcccatttacaataactatataaaataggacacaacgtaggtgtaaccttaagttctttaagagttgttcaacatgaatctttaatgttgaccttggttgcatgggttaatgaagtgaaactctaattatgatttttatccatgagtcacatttgtaagggtttgtactttgtagatatcacgttatcacaatttactataaggttgaacctgcaaatggttgattcaaaatgtgaaaccaaacatgacaattgtgttttgttttttggcgaggaggaaactaattatatgagatttgacattttgatcaaatatatcatcatcatcattattcttttcacgtgctagcaactattgcaatgacaaagaaatgattttgcaggaaatgtttagctagtgaaggttgaagaatgaatttgtaaaaaaaggcaatggcaacaattgttagaatttagtatgttagtggctatcacattgtggttatttattattagaaaattcttatttctatcctattattaaggacatatatagactgttggttttagttattaggagttatcaaacatggagtaatcgctttactttcacttaccatgtaaaatgctatatataagttgatgcgtgtgaaatgggattattgactttgaccaaactctcggttgtgttaactgaagtctaaagtcgactaacaatgttgttgctctctaacatgattgagacaccttagattaggagtgagtaccaacaaaagtcacttttttttttgaatttagcaaaagtcaattcgacactaagtcagtgactattttatcatagcatcaacatgtaataaattttgacctaatatagtgaccttaattgtacttatatgagttttgaacaagctggattcaatggcatggaacccaaggctagagatatcaaaacgagcccctagcaagtcgaagcgtcaaaagcaagtcgggccaacactattatagcaaccacttttaacgtcgtgtcttctaagtcggttgtaagaaaatcgacgtggtaggtaggtcagtgacaattttgtaaataattgaattgatttcacatttcgacgtcggtttcttttagaccgtcgttgtataagcctctacaaagtcgatttctataataactgactttgaaaaatttacatacttttttttaaaaaaaatttaacttcatttttaaaaatatatagtctttcaaagtcggttatttcaaataaccgacttagaatcttcatttttgtttttttttaaattattagattcaaagtcggttatttaaaacaaccgactttgtataggccattctcgcttttccttcatttttgttttttttttgaattattagattcaaagtcgattatttaaaacaaccaactttgaaagatttacatattttttttaaaaaaaaatttaacttcatttttaaaatatatagtctttcaaagtcggttatttcaaataaccgacttagaatcttcatttttgtttttcttttaaattattagattcaaagtcggttatttaaaacaaccgactttgtataggccattcttgcttttccttcatttttgttttttttttgaattattnnnnnnnnnnnnnnnnnnnnnnnnnnnnnnnnnnnnnnnnnnnnnnnnnnnnnnnnnnnnnnnnnnnnnnnnnnnnnnnnnnnnnnnnnnnnnnnnnnnnnnnnnnnnnnnnnnnnnnnnnnnnnnnnnnnnnnnnnnnnnnnnnnnnnnnnnnnnnnnnnnnnnnnnnnnnnnnnnnnnnnnnnnnnnnnnnnnnnnnnnnnnnnnnnnnnnnnnnnnnnnnnnnnnnnnnnnnnnnnnnnnnnnnnnnnnnnnnnnnnnnnnnnnnnnnnnnnnnnnnnnnnnnnnnnnnnnnnnnnnnnnnnnnnnnnnnnnnnnnnnnttttttttttttgaattattagattcaaagtcggttatttaaaacaaccgactttgaaagatttacatatttttttttaaaaaaaaattaacttcatttttaaaaatatatagtctttcaaagtcggttatttcaaataatcgacttagaatcttcatttttgtttttgttttttttttaaattattagtttcaaagtcggttatttaaaacaaccaactttgtatagaccattctcgcttttccttcatttttgtttttttttgaattattagattcaaagtcggttatttaaaacaaccgactttgaaagatttacataattttttttttaaaaaaaatttaacttcatttttaaaaaatatatagtctttcaaagtcggttatttcaaataaccgacttagaatcttcatttttttttaaattattagattcaaagtcggttatttaaaacaatcgactttgtataggccattctcgcttctccctcagccattctcgctcagcgccaatttgaaactcaaatttcaatttgaatttgaaatttgaaattccaacaaccttataaatttcaaccttatgttctctctttcacattaaaaatcaaacctccttccttccttctctctctttctcttctacgcttcttttttcctttctcggtcgattctactctgccgttgcgccgttaccaccgcgccaccaccgcttttgctttaggctatccgcttttgcatcttcttcctctcctcttctacttttgtctggtaatttctcatctcttctctctttctcctctctcaccttcaaccaccgtattccttctcccttttttttctctcatttcttttttattttctctccctgcctcagtgaatctcatctctcttcctcttctaccattaaaccatttcagtttgctatggtggttctccttcacttttatatacatatcttctccaaattctaaggtatgaaaagccccaaatgtttgaacccgcagcagcagaagaaacaaaaccgaaaccactataacctctcgagctcgctattcaggttcggtcccgtacgataagcttctaaaaaaaatatgacattcaaagtcggttatttaaaacaaccgtcttaaaatggtcaatatattgtctttcaaagtcggttatttaaaaaaaccgactttgtatctaagctttctaagtcgttttttttaaataaccgacttagaaaagacgattttttttaaaaataaaaaataaaaaattttcaaagtcggtccttataaaaccgacgttgtttgcttatgtatttaacgtcgtcggagataaggtcggttcggaaaccgactttgtatgatccaaataaccgaccttgaatgcctatgctgtagtagtgcaattttcatataggcatttgtttcactggtcttgacagggccaaagtacacatgtcaaataataaataaaatataccatgccaaataggcatgataatatttggccttatatttcactggtttggcctaggctgtttatcccatctaactaggttaaagtatccttttcttttcaagatgcaaatttgcaagcatagcctggcttgactcatatggtcatctggttgggttgttttttacagctctatccaaggcgtctcataggtgatattattgtattttgatgtagtgatagattaactttattttaggtcaatgtatggttcattatgaacaagtgtattttacaaatccagtgtttaagtgttgaccttaataacacttatgatttgggttaatatgatgctttaggctgaggtgtcccattacacaaattaattaaacctcaagctcagtccataacataagcctttattattgttttattaatgtagaaaaaaaaaagtgtctccttgtttttctatcactatcccaagtctctatatttatttagaaataatatttagtattgttaagatcccatatcaactataaatacaatcaattaggtccttgcattaaaaacacaaaatgcaagttcaggtacctaatttaaagaaactaaaaactattaaatagttgaagaacatgcaaattaatttaatctttaaaataagtcatttaaataaaaaaaaatatcttattaataaaaaatattatttttatttgtttatttttagaaagtatccatggatattcacaaatataaaaaaaaatacgagtaacttatatataaaaacccaatgaataatgagaaagtgctactgaattattattctacagaactaataattaatttcttgtctaccgtgtcatgttctcatccctagttagatctaatctaaattcaagatataatcaaagcctatcatagatttcaaatttaactaatatcaaataaaacttatgaaggatttgctgtggatgttgttgagatttgatatcaattataaacatgattcaagaaaaaaattgtataaatgataatataatcctcatcttatcttatgaactcacttataaaattaagttacacttattccaaattcaagagggtatcaaagctttattataggtcttgacataaattgaaagcaacaatcgcaacataaacgattacagaacacgtggcaaaaagttcatttgtgcagcaaacaattccaaagtttgatgggcattaatgcattatgatcgatgggagacgggaattatgataaataggaatttctcatggagagcttatggtcaaaggtcatggagtttagaggaaaatgaaattactgtataatggtaaaaaaattgctctgattgaagcacaaaggaaaaatataatgagcagaagttgaaggacttgaaagtaatgaattgtttgtttcaagccttaattagatcattcagtcctagagaaaattctaaataaggatacaagttaaaggacatacaagaccatgggcggacgcaggtgttaaattgggggggcagtgcccccccttaaattctcaagaatagaaatttttttataataataaaataaaataaaataaaaaaatagtttaaacgtttgtacaaaaggaaaagttgaaaagtatagaaaaagaataataaaaaagatgaaaaataaaaaaagagtgagtgtagatatgtatgtttgtaacttttatgaatgcaatggctacactcttgttacttttaagcaccgatcacatgctaattttgttaattttttctcttttgaattgtacatttttcacacttttgttataataatttgttcctttaattttcttcacaaaagaaaaatttcggaggtgccgcctccgaacccccgccactagtgccctcccttacttttttttctggatccgcccctgtacaagactcttcaaaactgaaattatcctatctttctcctaattttctttatcgaggagggacttcttttatttttttattattaattttcatcatttttgtaatgtcttattagtttctaatttagtattactcaaaataaaatacttttattacaatacggaactatgacataatcaaatttgttttcatttgaaaataaaatttattcttcgtatctggtcgttcatgtactactctatagaaatcggcatcttctatgcacgtgtaaatataattcataaaataatatttgaaaaattaatgatgaaaataaatttagtctgaaataatatttcacactagtctaatagttcgttctgctgaatatgtttgcagaaattttgctcgaataagaataacgctttggtcctcaaaaaagaataacgcaatggatttactatacaatttacaattgaaaaatatgattaactatccttaatattttcagaatttttatatttgatatttttgttcagtgatggtagccgggtttcaacatatgattttacgcaaactggtttaatggactaatttttttaagagtttattatgaaaaaaatatttttatttattaaatttacaaacatatatacttgtaagcgtaagaaccaaagttcaaagaaaatggtctactttttttttatacgtaaaaatgtttttggtatagagctatatataaattaattggacgaatgcccgcattagtcacgtgatttggatgcaattagtttcctaaaaatttatgcgttgcacacgtaaatataaaattgtaaaatgtttgatatcaacaattttgttcgcattgcatgtctgctaatcactagtttagtaggaattctatctaatttaatcattcctccagaagcaatattggtaaactgatgcaagtacgatttcttttgataaattatttttggtcaatagccatcgagaagggatgaatttcgtgacatttaattaatataagacccaacaatctgcagtctgtaatgttgcccaagaacaaaatgacaaggcactatccgtaattttctcaccatgtgcgattgtttgtgatagtcatctaacaactacgattgaaaagtgttacaactaagtaacagagatatccttaattagatttcacatatattgtaatgtgttcatgtgaacttgtcttctactacttgaatgttttgtttttgtttgcggaggaggaaaatgttcatatgctaccttaattagtctggattcctaaacgatgtataactattttgatatactgaaacaatttgtaaaatatatatttttttacatttttttctacaggttgaaattcatacaggtctccctagtttggaaattggaaataagatccaccaaatgagaaatatatatttcaacattttataaaagagtatataaaaaacagggtgtattgatagtatttcttgttatgaatttacttactgctgattgacacagtattttttttatactagataagactttattagcagaccaaatgtcataatcagtagttacaacttgccttgctagttgaagatataggcacgtttgacagctcattttctaatatatttttacttaagaaaacactaaaaatcatagatgtatattacttatacaaataagtatgttatgaattgatcaaattctgtgaaaccatatgtgaaattggttaaataacgacagaattcatgcatgatatatttctatgctagaagaacttgtgcaagtttccctaagaatcttgtggactggtcatggatctgcaagtggtcaagttaatacaaatatgttttgcgaaaaattgcgttgcgctagccgcaatgtgaaaatgtgatccataacgaacgatcaaatatgttaatcgttttctgctagcagtttgacattataaaatttcaaacaaaaaatatataaaaaaaaattcaaacaaatactatatatttaattactctctagatcattggcctaaaagagaccatgattaggatgaaatgaaataatcataggatcttgtctcaacgaagattttaaatgaaaggggcattgccacataattggacataaattatgaatgttgcatacccaatagtcaaaaaagaacagaggggctagatagccattgcctattagacattttattagatattcatgtatcgtgtttgatttcaattatttattgtttaagtgtgtgacttcatattatatattcctttcactacgggacaatgtgccttcgcatgcactactcaacaacgagggtttattaagatcagaatgaaagattataatatctagcaagatgaacaaaaagtctaattttcctgttagatatctctagaagactagaactacaacgacactagtgattcaatagagaatgaagtataattccattaatcagcaagattatgaatgagaaatagtttaattttgtgtcttattatccaacaaacattgattgctgatatggtccaccatggttgcctttgcttaacccccttcccccacataaaagtagctacatgcagacaatataagaaattgaaagctatgagattaaatacaattgcttaggtggaacctaacttcatcactagcagaataggaattcgaagtttaaatcaacaaaccgtcatgatagtaaagtaaaaatggattattcaaaaagtatataatttcatgttggaattaaactatatggatttatatgtacagagctctagtgtttgaaagaataaagtaaagaatcattatgccttccagttaactttatgttctctgctttaatagcagggtgaataaacttcggggcaagatcacattaaaaatgtagcaaccatgtattgttctaccaaaatttaagcagcaaaaacagatagaaaccaagattgacaaaacggtaacctaacttctatcatttcaaaagagactcagatagacaagcaaaagcgtaacttttgtctttctcttgcattttccttttgtcagcatgccctttttttaattctaacggtagttttcttaaatttaaataacatggttgtctaaaaccttatgctttgtctggtacgagtcttttgagtgaaaagaaagagattaaaggacaatagaccatagagaagcaatcccactagcacacatgacatattgttggatggagtataaatagaaactttttttacactttttaaattaaaaaaatcagcttaaatttatttttaattaaaattaatattataaaatcaaaattattcaaaattaagtttatagatgttgatccaaatacatatcaaatatgttttatataaaaaaaaatcattttacttattaatttttatcatcgtatcttttccattaacttttatatttttcatttgaatatgacatatacaaaaaatttaggttatatatattttcaattttactttccttcttttctttaactgaaagaaagaaaaagtgtcgtcttataaccaaacatacgatttcgtaataccaacaaaaggcagtgctttttcttttcaaaaaatccatttataataatatattaaaattgaagcgcaaagattatatcattaacaccttaggttttatactaattttactttctccatgtcagcactttaatttattgatattcacctgttaagtgaatcttacattctcatgtttttcattttgtaactcactattttttaacaccaatgtcttttttatgtatttccaaatttaatatattttatttatttattgaaatcgaactcaggtactaagtttccaaatttcaaccaatatatgttttaaacaataattctgctcctttctcctgctaaatttgtaggaatcattatgatatattaatacaaagaaactatggttatcatgtcttttagaacctcgtggataagtagttcattagcaacattttaatatatactgtttatgaaagggaaaatattttgtatttttctcccttacacctaaaaaggcacgtaattatacttttgttgcttaaaaccagtaactctatgaagtttttagttgacattcctttatatgacttaactcacttaagagagatccaaattctctattagttttgaatctaatttaatatttggtaataaaaagtaacaccacaaccaaaaaaaaataacaaataggagagaaaatatcattttttttaataatgtgttatttttcaattagggaaataagaaaaagaaattaaaaataaaataaggtaattaactaaagtttaaattaacttttaaaaatttagccacacaccatgcatatgtatgcattatttaatttccttcacacctattgtcctgttgtacatcctcctccagtcactcgtacctttttccttgttttttttatttaaaaaaaaaaactcaaattacacaaaccaccattatttgcagtcaagcgacttaattgctttctacaaaacattattatcatctcattacgaaaacaattaaaactggtcatcgccgaagcaacaccgcagattcacaccctaccccattgatgaaaacaacccaaaaagtttagactttttccttaaccctccatccccaaataaaagtcgagcccttgaaatagaaataaaatataaatgaaatcaaatccatccattaaaattgagattatgacataaccaaatgaagcctcaagcaactctctaatctctatcacacccgtgggccgtggtgtaggggagaatgtagaattgggaaaaacaataataaatgtgagaaaaacagtagctactcttgcatatgcaaaatcaaaggcaactcctttcttttcaattaagataatagaatgagattacattgtatctacatatgaatcttgtttaatatttttttaaaaaaaaattactatctatagatttctcgtatatatacaatcttatccttatatatataaatgaagtatttttatatttaaattcataattaataaatatcgaaatatgattttatgacgactcattctttaagtcataggaaaattataatgtaaatttattttataccaataataatcacatattataaacaaaattaatatatgatcaaaagtaaataatagtgtctctctagccgagaaaaaaaaaagaccagtcaatgtttcactgaaagtcaatctttcccaccatttctttcctctccccttccttcctctctctctaacccaagtccaatcttgaaacctttcccttcactataaattccaccatcccattccaacatacacccatttttccaccctcgtgattcggtctcacacacacacacgaaaaaagagagagaagagaaacacacacacaagcatggaggtggaagtgatggttccaccggtggacttcaacttcgacagcaactgctcctcccccttcatcaccgccccttccagcccccaattcttcgcttccaacaaaccaagcttcttctttagcgcccccaccagccccacacgtggcacctcctccttcttccacgactccccctcctcttcctctgttcctccccatgaagaacaacaagatttcgagttcaatttcagcggccacctcgaccgcccttctctctccgccgccgagctcttcgacggcggtaaaatccgtcctttgaagccgccgccgcggcttcaatctccggtaacatccccgaggttgaaactttctccccgcaagaagaagaaagacttcgacccttttgcagaggcaatgaaagaaactcttaaaagagaagaacaagaagaaacacaacgagggagggaaagggtttctgtttctggtcgtaaaggaagcaggtcgttgtcccctttgagaatctccgacatcgtcgtgtgcgactccgaagacaaaagcgtttcttcctcaacaagcaacaacaacaacaacaactcaaaaacatcctcgtttttgtcttcgattcccttcacgagaaaatggaggttcagggattttctcctcttccgaagcgcctcggagggaagagcaacagacaaagatcctctgagtagaaaatacgcggttctgtcgaagaacaacaacgaggatgttcggaactgcagcttccggtccacggagagtacttcttccggttcggtctcgaagcggcgcggaccggtctcggcccacgagctgcattacaccctgaaccgggccgcgtcggaggagatgaagaagaagactttcttgccttacaagcaggggttgttgggctgcttgggctttaaccctggtaatatgcataatcacatttctaaggggattgggtctttaacgcgttcttagtcaaatccaaattcctcgtttggatcttgctttactctctttgttatcttggtgnattaggtttcatactgccacatgttcacttcgtgtttttttttttttattttcatattgttgtctccatgtttacatcagagactgaaatttgtgtcaaaatatttgtaccattcacacgaacatatatgaatatatatgatacgtttactcatacatgtgacatgtacttatttagctttggtatttttcataattggtagtaggacgttatgtttggtcaattgttgtaaaatacactaacaagtagtaatatggtatagtctggctcattcgcagagtaacattttaactatttgattaatgattaattaaaaattgcatgtattccacacactttgttggttttgcttaggatgagaaaaaaatttgaaatttgatctaaagagaaaatcaaaagaaagaaaaattattattttttgtttataatgattaatttctatctatttttttctttattttcttttttacttaataaaagaaaattcatccttacacatattttctctcagttttcctttaattcaaacattgatatacgttggatcggtgtttttgttggatatgactcatctttcgcagtcagatgacaacccttcttgttggcggggtcagcagaaagccaactggatttcttgttggcggggtcagatgacaatcctttattagtagttagggctagggcccatgaatagctactgttagggtttcttttaatcctatttatattccccttgtaaactgagtgacttgtaatgaatgacagtgagaagattatagtacagacaagctggacgtagcctacattgggtgaaccagggtaaaatactgtgttatatttctcttccctattctcttttctgtttttcgatttgtgtgtgattgtcgatttccaacagttttaccatacggaggtgtaatatataatttctcatacactctttttatttttattattggtgagaatttattaaaaaaatgattttaatgaatgttatcaaatataaagtaagactcataataagagtgtgtataaaatactagttttagaaaaataaaattattacgtgatatgattccaagttccaactaatctttacacaatacttcgaggttattaatgttttctagtaaatactagggagcattgtgcaatttcctatgggtaatgatctgaatcctaagctagctatgttttcaacatccaaaaatctgtgctattgccctgattcctgaataattcttccctaagatacgagtttggcttgcaagtaagactttcaactttttagaaatttttgatgcattcatggtgaaagttttaaacggagaatgataacagaacatgattaattagctaaaagaaccaagaaaaaacctcaacgtggaaagaatataagcacggtgaaactgacaggtataaacggagaatgataactgaacatgcttcgcaaaaagaaccaagataaaacctcaacgtggaaagtatataagcatgacataagaaaaagaaggaagcttttggtcttatataataatcattaggctttggaaaaatgatggcaacggtgttgtacagtgtaaagtgtgtggttgaaatgggcacccacagtcaaattaaagtaaaaaaattaaagggagatataccaaacttgtgattatttgtctatcactacagatcctgtaatgatgaacacctaacaaaaatacctgtaattaaaataagaaagcctaattatgtggcgggtctcggaataaacaaacttctaccccttcctccccacacatgaatataagaaaacaaaatggaggactgtgtagtacatctagaggagaagaaaaattcataaagtaatttgaaaataaagagaaattttaatttaattttacatgttttctatcctatgtactccacaaggtgaataaaattatgagatgcatattcaggtgaatatcactttgccacttgacagttgtctcaacttcatttgcgaaagtgatttcagtagaattaagtataggtttggattacagttaaaaaaagtgaaatttgatggaatttaactttctaaaattaagttttgttaatagtgaataattatagagtaatcaatcttagtttaggtaaaaaactcgatcagaaaaaatatttatcaaacaagcatgcataaccttcaatgaaagccaaccctcaatttggatgttcaaatgctaaaccaaacacaatctaagagcatatttatattaaagttaggagaataagtatttttattttagaagcaagaatggtttttttcttattcttatgatacattagaatatttgttattgtgtattagaattcacaaatgtacttttcaaaccttaatccaaacatagcataattaatcgcaaaccaaagaattaatgatgattcagcagaatttcattgatttgctggagaattgaataattttcactcctctcatcattagttctcttatgacttatcttaatttatttttgcccgcagtcttgagtggtgttcatagtttgctaatgcatggagctaactagtattaaataatgtgaaatacaaggtgaaaagatcaaattggatgtacaatccagacaagcaagtcagaaataaacgcaaaaaagtttcttctgaccattaagcagtcatgaacttgtgatactatagcaagtcttgtactacaggaccacagttcccagcttcaaaagcagagcacagcgtgacccttaacataagaataaagctagcaaaagcagagcaaaccgtgcaaaacgttggaaatgacctaccacgttcttgctcctaaatcctaatacatagttgattagttgtactataatactttatagagatataataaaacaatttaataatgaatttcagttttcggagtagtttaccatacctctttttaactcacattttatcaaatcaaaatttcaagtgtatgaagtttgaaaagctttgatacgtggaatgagatgggataacgtattagataggttaagtttagatatatttaatgtctctatataaatatagtggtttttattttcaattttcataaaaagaataatttctatataaacctgtcattagcaaatagcaatcatatattttacattcttgtaaatataataattttgtttttatgttcctatcaaatacagtaatttttctttagtttctataaaatatatgtttttcttttaaaaaaatagtttatgttacttcatccataaaatataacgaattatgttttttgtttttgttatcatggttgagaacaaaaagaaaagtgacagcaaaaattacagggacaaactttttttacaaagactaaaaaaatagctatatttattggccttaattaaaaacatatatatatatatatatatatatatatatatcaaactactcatatgcatgtccttgtgagttgattttatagtaaaacaggatcagaaaaaagaaagaaaaagatgaatctgaatgtttattatgctaagaacaaacaaggggtcgctgtctatcattttaccaattcaaatactcaatcatgaactacgctagctaataccgacacacacacacacacacacacacacacacacacacacacacacacacacacacatatatatatatatatatatatcagttgaaaaatcaatatttagcatgctgcaatcagtgattcgagcatatgataatttccagctaaaggtataaaaagaaagaacggaggtccgtttttatttatccatgcatgcatgttcatgttcatgcatgtggttacgcagtcctttaaaagaaaaagaaaaaggcaaatgttttttaggaaaagaatgaaaaacaacatagccaagccatgcatgcatagttgtctttatgtaaaggcaacttctgtccattgaagaggaaacccaaatgattatgaatctctacaatttgttagctactacacttttctcgcctcctactttattatgtgccactttttttttataacttattatgtgccactttggagtgtacaatacaacacaatatatcaggatcgagcataagtgaccatataaggccacgttaacacaatatatttatgctcattttctatgcggggtcgtcctagtcatagaggactatcataataccatggtgaaatgtatgcatatatcaagtagaaaaaaaataaggttgaaaatatagagttgaaaaatgattggttattagaggggattaaatggatcactaagtaatccatgaccgaaatcattttgactatatcattcagctacaagacgaagaccaatagattatgtataattttggattaaagttgagagagcttaaaagtatttttaagctaaaaacaacaaattttcccttctccagtattaaaggttggaacatgcaattttatattagaactgacaaaagtactttttgtaattttaaaccaacttaattgttttcccgaaattcattcattgtaatttaagaagcctctagcttgacttgaaaacaccgggcggggtaaaatttaagtaaactagttactctaataattaatgttgcacacattttctcaatttatttcttacgtaatttgtatcactaaatttgcctaaaggttaggctaaaactatagattttttttttatggaatatataatataactatagataatgttaaataatatatttttttaatttcacttatatgtaaggatagtataatcttattatttgttggatttatattttccttttgtctctcttatatattcagactttgtattttggttgaatagagttgaacttcttcatctctcttttcactctttccattttcttctttctctttgtttatatttgcattcttgatatggtatctagagcaagttcgattcaagtcataactttcttagtccgcactatcagtcatctatgatgtagttcgcgcagtccacactccatcaagcaacaaattttttttatttgcaattgctgattcattaactactggattcagctggattttggacacagagttcggaatacgattttcttcattctgtcgggttggatcatgagggagaaaagtggtttgcggcagcaactttttttttttcacgtttctggaatttttgtttcaccttcttgttgcaatttgtgagcatttacattaactgttgcaatagcagctgtttggacagaccatttgcaatctttcggctgatcctatttgaagctacacatctagggttttgcagtgactcatttgaaaaaaatgagctttctctccattgtatgttctctttattgttttctaattgtcatttgttgtaatggcttagtgagagagatggtttttttttttcttctttcaatctattagtgtgcaattaaatgggtagaattgctcctattggagttatgacaaatatagttattttaagcaaaaggatcattgaaaagcacaatgcctgaaattgttgaataaatcactagccctatgcaactatttcttcactagtttcgtgatttgctttaagagatacacatgatttgctttaaagaatctttcaatcacaacctttattgttcttaattatgatttaacgattattattagttgtttttattttttattttaagaactgttttcatttgaaacatatataatagtattttcaaatattattgagatttgattaaatgaataaatttaagctaatatgtatatcatagttttctattttttttaaaaaaaaacaactctcactttaaatttttaatttgatttgaattatttattactttagatagtgaaatgaaaataataataatgaaataaaagaaaccttaatcaaacttaactatgttctctcagaattgaacctatctaatatttattaagttttcataacattaaattaatattttaagttttggtattcatataaagaaaattttgaatttctttaatattttttttatcaatgtttaatttttagaatcaacattgattttttcaaactatcaattaattaatattttattattgaaattaaatttaaaaattgttcaaacttcaaaaaaattaaataattttgttttcatattttactaatttttatactttattatttatattttgtatgtagtaaataccttatataccaaataaatgctagttgatttgcatacatagtgatacatacatatactgtagaacttgagaaacttcaaatatggccctctagattagctggaggcaggagacacgcgtcaccatcagtcgaaattattgactcgtaaatcttaaataattaaggataaaaaaatagtcagagcatgtgctcgttttatttgttttttactaagacaaaatataaattaatacaaaaatactagtataaaagaaacctgaaatatcaaatatgttatgtaaatttaacacaaacaaaaaatgtatgttaaaagagtcattggcatcatgattgagtttgctaataataagtaagcaacttatcctacaattcaacgtgtcataattaacctattcctaatctttgcatggtgtatctataactcaacaatgatttgagattctagatcaatgatgttaatgattaatatctacacataatatgcatgattaatttgttaattttttaataacttttaaacttttgtagaataatctctatcgttataatgatgtgacatacatcttactatgtgacaccaatgaccattttgaagtaacaagttaaatgatatgtttagatgcatgttatcggtgagaggtgaaaaagattatttcaaaataatattattttcatgaattaattttgaagtaacaagtgaaataatttgtgtattttgttagtggaatcatatttttgtcaaaagaacatttttgaaaaaaataatatttaaaacacatgtggatatttttaaatagtaaatctgatagtgaaaatagttgctccgtagatttgttgtgtgctcttactgaattagttttacattaatttggatttaaggtgttagggttgaggctaaaactttatacactcatactattgtttcttgtactttttattgtattccagaattgggaaatgtaggaagtaaaagtggtagtgcaggaagcaataacccagggattgatatatataatagacctactttcaccaacatgtcaaaatcctcgattttgttgggctctaactcaatccacttaaaatgagtgaatgaaaaaagtgtttactctgcaccagtttcagagtaagccaaaatattatacctactttcaatcggttattctttttcattgttttcgattattaatggggttggagaatgctcgatcaaagaaagtatcataatttgtggtatgggaatataaaaagtaaaaacattagaataattatgcaaagtatatgttatataaacttgttgtgaaatgtttttaactcagtctcagagcagcaaattaagattgggagactatgaagacaagaatttaaatgtttttaactctgtctaagagcaagaggtagttggtatttttgctgtcaagtgaagtgaaataaaatctcttagaaatacaaaacccgtcttttggaaagaatgccagaaattatacttaaatggatgtgtgcgttacgcgagcccagtatatggtgtcctctagtttagccctatcataattgggcctcagggcttttctgcccaaacaaagacctttcacaaaaaaatcaaataatcaaaccaagcttgttgacaaaaaaaacatatatcgcagtttagaaaaaatagaagaagagaggcgaaagaactgaatcatattaattaaaacatgcaaatgtaaatgatggtggagatcagaagaaaaaaaatacaaaatttgtaagaatgaacatatatatgtgtaaaatttaatggatctgatgagaaatactgataaaattgagacaaggtaaggaacatatagggtttttgacttcccccctttctttcatcaaaaataagaagcatataagaaaggtgtagtttttaaaataagcaaattataaatgtaactattattcactttaggagaagtttttgtaataataagtcgtattttttataataaaaaaaactatataacattgaaagaaaatactccttctatctcatattatatgtcacttttcatattttaatttatctaaaaaaatttccttcttgtaaaactaagacaatattatgcaccattttttaataatactttcatttattaattgccacttaaagaactcacaatttgatctttacaattttaataagagcaatttcttatgaaaaaccattttatgataacatcttataccattactattattttttcagaatatacgttatcttacaaaaggttcataataaagagtagagtgttcaaacaaacaaaaaataaagagtagaggatctacaaatgaaaagtaaaaaaaaaaaaaatcaaatcaaatcaaattgctccattctcaatcttatctcacctctagtggagaagattcaactccctcaaacataggaaaacagcagcaacagtgtgttttgtttttgggtggtagtggtacatcactacagcatagttttttgttttagagcactgaactgagcagttagcaccacccaccaccgttctttctttctttctgccaatggatcaatctttccttgttatgctctccaatctcctccacctccacaactccctcgaccccaccacctccctcctctccgacgccctctcctcctcctcctccgcctccctcctccactcctcctccatcacccctctcctcttcttcaccatcgcctccgtcctctcctacgtcgcctccactcgcccctctcccaccaccaccaacaacaacaccgccaccaattccaacaacaataacccttcctcggactactctgtctccgccttccgcgccctctcaacagaacatatctggtccctcgaagcccctctccgcgacgcccactggcgctccctctatggcctctcctaccctgtcttcaccaccgtcgtcgataagcttaaaccccacatcgccctctccaacctttccctcccttccgactacgccgtcgctatggtcctctcccgcctcgcccacggcctctccgccaaaaccctcgcctcccgctacgccctcgacccttacctcgtctccaagatcaccaacatggtcacgcgcctcctcgccaccaagctctaccctgaattcatcaagatccccgtcggccgccgccgcctcctcgaaaccacacaggccttcgaggaactcacttcgcttcctaacatgtgcggcgccatcgacaccactcccgtccatctccgcaataaccctaaccctaacttctaccgctgccgctacggctacccttcgttgctacttcaagtcgtgtccgaccataagaagatcttctgggatgtttgtgtcaaggcccccggcggcactgatgactccacgcacttccgcgatagtctcctctaccaccgcctcacctccggcgacgtcgtgtgggacaaggtcatcagcgtccgcggccaccacatccgcccttacgtcgtcggggattggtgcttccctctgttgccgtttctgcttacaccgttttctccgagtggaatggggactcctgcccagaacctgttcgatggaatgctcatgaagggaaggtctgttgttgtggaagccattgcacttctcaaggggaggtggaagattcttcaggatttgaacaccggcgttcgccacgccccgcaaaccatcgtggcttgttgcgtattgcataatctttgccagattgcgagggaaccggaaccggagctttggaaggagcctgatgagagtggacctcctcctagagtcatggatagtgagaaatcattttattactttggggaaaatttgaggcaggccctagctgatgatttgcaccagaaactttcctcaagatagttggaattagatagttacttgctttttactataactgcctcgcaagttaggggaaggagggttcgatcaaacacacatagtgtgtttttatgattatgttttagttttgaataatttatgagcttgttggtgttagtaaccaggtgtagaaaaagaaaacatgataaagattggtggtggtggtgtggcgtctaactgtaatggcatagctctagtcttgtggaggtggatgcgaatgtgaatgtggagtagtggactactaacattgttctgtattcgtatatgaaatgatatgtttcagactagttttaactctaatgccatatgccttcatactctccccattcggttttttgttttttattctccccctccttgaagattaaatcagtttacagaaatatcatatagcaaatagtcattttctctgggcctaaattgcttctttttggttacatttttagtgagattctaagtatgttattgccaacggaaaacaaatcgattaggccccaagtacataatttgattttgtggttgtttggtgttcaatctgcagtgtctttaatgaaaattcattagactgctgcttcaatgttaagctgatctaatgtaatgttaatatgttgtccgcatcagtctagctgcatattacctgaaaggaatgacaatgtgtggaaatcagaggcgattgtttgtgttgcaagatagttgggtgatttttttggtccatataatatggttcacatattgttgccgccagcttttctatcagcaagatatcagacatcacaccgagacaccgtgtttggaattgcattggggaaggggagaaatcacatcaaaacaacaattggtgcaaaagctagaagttgtgactttcattcagatgttgaacatcatcatgacggtgatagcaacaaaacacgctgatggtaagactctacgagccggtacctaaagccaatctaatggaaaaagatagttcaaaacgaagacaacagaaactgtttttttctttaaaaaaacactacacaaactgttggaaaccgtagatgtgaagtaagaaaagagtaatgaaactactttttttttttgagcgggggtaatgaaactacttaaaattaatgaattttttcgagcatgatatattatattataataaaaagttatgaaaacaactaaaatacaatcaataattgtttattacgaaatttattttggtatcatcgtaacattacattttaacaaatgacaagaatgaattcaaattctgtaatcaaagcagatagtgcatgcacgttccgttcattctgcactttaccataatttttttttccgaatgctaacattgtctgcaccttttagaatcatcatgaactagaataccaccaatttttaccataattttttttttccgaatgctaacattgtctgcaccttttagaatcatcatgaactagaaaaccaccaattcctgttccctataagagaccaacaacggaaatgcagtaactagatgcttgtccacgtatttttgttactcggtttatagtttatactttatatacatttccaatatacacttgcgatataccaaagcaaaatattgaaaattgaaccagaattgacagatacgacacgattgactaggctacgattcggagagtaagcttatcggaatgtgcgtcatggtggacattgtttacactttctaaacaattggaatcgttccacagcttccactaatatttttaattatacaccggacaaatatttgagtatatgaacatcaagtacgacatatcctatgaagtcaagtaccttttccatcatatcttcacatatgccgtacagcacgtctcaattttcaatatatataagtaacgagtaccattagctcatgattataatcaataaaattcacttaaagataattaacttgatcaaaaacacctaaacaaagttaagagacgtattacctaatcgataatcaaaacattaatcaaaacatgcaggcccagagaccccataacctaataagatcagtatataaagggaattgtctacaagtatatatcactattcatttgaatattctttaaatgtcatttataactttgaaccgaatccttattaaacatcaaagtaccttttgtagataccccttttttcgtactcacatgggagatacaaacaagttatcactagaagaaccattcgaaaccacaagtgcccttcggcggaagaggtagcatctagtctatttgtgatagtagcagtttcttaaacagctaaaattgccaacaatcacaccaaaacatggtacgaggaaaagtaattaattcaaagaatgtgtaacataacacacaaaataccacaaaaataagagtaaaatttgaagactcacaaatgtaccgtgtgtacaaaagtattcattaatacaggtgacaggaaattattaccacccatcaagacaaagctaatctaaatctacaattcatatattaattcgtaaaccagatctgtagactattttacaatttgagctcccttcaaaagaatcagagttacatttcattatgaacctgtactttaatgggtgtgtgctagcaagagcttcagatagcaacaagacaacaataattggttccagcacgcactagatacaaattcaactatggtcgagccacacaaggcagagaaaattcagcatatccatagggcttttgctttaaatttcattgaacctttgcaaggcttcggctagacacaccgtgtaataatttgacaaacccaagaaaacttaactttccatcagtgtggcgtatccaatcatgaagaacaacatgaacggggatagagggaccaagtccaagttcctaaaacaacattttgaagaaatatgatggtgattatccaatcttgattcttgaacattaaaaaaaatgtaatttacaaatgctcatgactccctaagattagagagtcaatcagtatgagtatattcttgacagatccagtagtaataagttgcaggtaagtgcacacacacatatatatatgaagtggcagaaaccaacaaagtgtatatgcattaaattatgcaagagatgctacgagatgcagatactcaattatttatgttaacttactgaagcaagctcttcaatgacaatagccctgtttccgtctttatcaaagagttcatatgcacagcgggcatgttgttcccaacgatcaagagcttcaagttgatgcacactcaatgcagctgcacaaaattcttcaaaatccatccttctatattgtaacgagttcagctgtcacaaaaagtacaatagaaggaaaacatatgagacagaaaagagtcaaattaagggatatctacatacaaagaacaaggtaatattaccgatgaaaggaagtcagggatgtgagactctttcatggcatctgttgcgtatttcatcaaggcctgcccagagtaagaatgagaaaaacttttggaatctaataatgggataattttcatacatgacacattgaagtgataaccaaccttgttaacgttctctaaagatatgctaccatttttgcttggttctagcagtgcaaattgctctctcagataatagagttcatcagcagtcaatgtttttgacaaggcctgccaaagagaaataaaattaactagtacaatttaaactagagagctaattttaagtgtgaattacattccagtgtatttaggaagtaaaagactggtgtcagaactttgaattcaattgcaacatgtatacatataagttagtatcacacctccccaatgttgttagctgaaaattagaaatatacaacacagctccaacaatataccactgttagttaggacttaggatatccatttttttttaaagcaaatcaaatctcagaggtttacaggatagaaataaattgaaaatacttgtggtcagaagattatatatccttttcaaacatgagggttggaatgaagttgaaatacttcattccaacaagaagcataggaagcacaaataaaagcagttcaatttttctttcaacaattaaaatacgcaccctcaaggcagccttgcgtaaggatgaagatctcatatatgtcttcatgagcttaaatattaaaatatcaagtggaacttttacattgttgcaatttcgtatccaaggatgacctgcaagcacaagattatgtctgacaacttgaaaaatgtgtcactagatgttattgaaattgatgatagaggcaagaaaaatatctcacttagagcctgagcagcagatattcgcttccgtggatccttattcaataagcgtttgacaaaatctttagcttctaaagataaagaaggccacggtgtttcgtcaaagcttggatcagctttcaaaactgccctaaaaataccagactctgttcgagcccaaaatggacgactaccacataataaaatatatgctatcacacctatactccacacatcagcctctgtgccataagatctatggagaacttcaggggccacatagtatgcacttccaacaatatcattaagcctttcatctgtaagatgtgatacaagaagtaagaacattgccaaactcatgagacaaaggatactactaccaactaccaagtaaggacttgtgaaggaagacctggtctgacaaaatctgataacccaaagtctatagctttcaattcagaactttcatcctttttagcatacaagaaattctgacgaaaatggcaagggggttagaattaagacaatatacaatggtatccaaatggaaattcataaccaacgagtcaatttatccttgaaatgttgaatatattagttattcattcatactatataaacaaagggatttatatgggaaaacaatttcttcatggaatttattttgctgtaatttactttgttttttaaatattaaaacctatgttgaataatctagtataatgcttgagctgtgcccaagtgaccggtgaactgaataaaacaacaaaaagttatgtcatatattcatggcttatattgacctatatactgcaactgaatgatgtatgaaaccaaaagggaaaagaaaaatcaaacaaaaccatcaaaaggaaacaaaaaggctaaattaaaggctatctagatattccaaaatccagtctagctagactcctcaaaaaagttagtaagctttatcaaacattctacaacctttgccagccaaaaactaaaaataaaagtgacataatacttctaggcttaatccaactctaaagttagcaccaagcccctgagacacaagaataatgaagagagggtttcttttgggagggggtgtaaaattaagacagttaaatgagtaacccatccatgcgctgcttagcatttccatacttagctactagggtattaagatgaatatttgaaaatgtagcagataggctttaaccatatgaaagaaatggatacaaatgtgctcacctctggcttaagatctcggtgtaccacaccctgaagatgacaaaatgcaacaacattaagtatctgtaccatgacagcctttgcatcatcttctgagtatttccctcctctaaagaagaaatcaaccatatagttagtcagtggcaaggtgcaattccaaaggtcaatttttttaattttttattattatcataattagaaaaggaaaagctggaattttatgaataccttgataatatcatatctaagagctcccccccttcacataacctgaaacgtcaataggatccagccaattacaaaatcatcaaaaaaaaaaaaaaaaaaaaangataatatcatatctaagagctcccccccttcacataacctgaaacgtcaattggatccagccaattacaaaatcatcaaaaataaaaataaaaaatcaataagcaatgggcattctgtcaacaatttttttataacctaatacttagtgctggtgtcactaaaaaggttgtattatctgaggttaccataagatattttatttggaaaaaaaaaaaaaaagtattattaaactttactaggacggccacaaagcactactgttacaatatactttgaagaggaaataagcatcccaaacttactccattacaatgtagacattatcttggtcttcaaatgcatcatagaactgtatcagattgctgtgtccattcaaagctcgcagtattttcacctcccttctcacatcttcaatagcaattgctgtagtcatctgccgacaaaagggatgaagatcaaaacacagtctttatacacacaaatcaccaaaacgacataaaaccttaagtttagtcaagcaaatgtgtgcgaactcaacgactaatgcagtattgccatgtgtacaaagtggtgcatcaaaagtgttaaccttttatatgattaaggattgaagattgaaggttaaaagattaacctttgcttttggtatgaccttaacagctacttgttgtcccttgagctcacccttcttaaacctagcagaacaagtatacccaaaatgccctcgacccacttcttcaccaacctccaacctacttgtgaactccttagagaacccaaacctcttatccaaatccgccgcaccctcctccccctcctccggtatcgccgccgtcgccgacgcctttttcccctgcctccttgcaagcaccgcccttatgtgcttcgccggcgacggcggcgggaacggccgccggaaaaacctcctcggcgtggagctcgcgctccggctccctcccgccggcgccggagacttcttcaggaagcgagcgggactcgggctgtagaacgggaagaacggcgaccgttttccggtgctgacgtcatctatccggcgaggggtgtcggcaccggcggggctgagtggggttttcgggatttgtgaagggtcggcttcggcttcggcttcacgaagcgcgtaagggttcggcttctgcggcttcgaagtgcaaacccccattgctgaacgatcacagaatcttcgctactcaatcattattggtcacaacattgctaaaaaaaaattctgggtcttgttgttttgtgctaaagattcaaactttgaatagctttttaaagagggtagaagattggggggaagtggatttgtgggtgagtggaagaggaagaaaaaaaagggtaatttcaagggacacgtggcaagcacgtgagtattggggtttgggtgttcattgaattgggaagtgaagaaaggaagaggaacggttctgaaattgaattaaggaggaagaggatgataatgagaaacagtgaagcttagttgggaagatggcaaaggggggttgtattgtttgttgccacaggtttggctacatattgttccccctttttgactgatcaccaacattgccgtaccaagagaaaaaaataccattattttagaaagaaataatgttttaataaaaataatcatcattttattttaatgaactcaatcgaaagtcaaaaattaatactttaatattttaatttttttaaaagaaatttacatattataacatatatttttctacgtgtaagtacaaagattttaaaccctgatcacatatttaaaaaataaggttatttgttagcactttagtttattgttattttcataatgaacgaggcaaagattgcaaaaactgatgaacaataataaaaaaaaaaaaagcaccatttatcgctaaataaatatgtgtaggtttgattgaatatgtgtaggtttgatccaatgattaaggaaaaagaaagtgaaatataaacaactagataagagagagaaaactttcattttccttctttttttcttcatgcatgtatatttgactaaaataaaaatactaccttatttattcatctccttccttagtaccacttgttattattaggttgaagcaaagtccaatttaagagctttaatatattattgacttcattaaccacttattataatagtttgggcgtgcttcttccctctttgtttggcttaaacaagaaatcaggccaaatgttctattcccttcccaaatgtttattgaacaatagcgacagacttttattatcattttgttagattatattatatgaatacaaatttaacttgtacttgtacataaataagaaaaacggaaatgacacgtatcactttctgaaaatcattttttacttttatataaaccaataaagagagggaaagaaaaacatcatgtcaaaaaaacctcaccacctatgtcatcacttttttttaatactacctatgtcatatctctgcttgagtaacacagctcgtgtatacatttggctaatacataaaatgaatgcagtctgaaatatataataatagataactttattgagtttggcttctttatttttggaggagccaacttcaattttattaatattttatagcatcaatattcaatagtgtctaagatctgttcttatcttgggactctgatacggatccggtacatggaagtaacttgatttgcgagtactatatgatttgttcttcacatgcaaacgatcgatttaacaatgcacgtaagacaattttataaatttccctgactaacacgacttggaggttctcaacccatgtgcagggccaagttcttctcaacaaattacagagagtaattaataagcaatccctttgtatccttcatttggtaattttaaagggtagtgtgctgtcaattttttagtatggatactattattgttcaatggcctgtcactgtatgaactgactgattttaacttatgttttagattttaataaaactatttatgaaagaactgtatttaaaaaattgatttatatatgagaatgatattttgaaagtaaaattataaaagttaaataaacttcaagagtagttctacgccaaaataacttcttatcaatatatatatatataatatagttttgtaaataggataatgttcgtttttagtttctaaaaaataaatcatttcattttcatctctcatttatataaatactacatgtgatttttattctttaaaaaaattcattttttaaggataacatatgatatattattataaatgaaagaataaaaaaagacaatttattttcttaactgaaaatcaatattaacctaattatggagactaaaaatttgtttaattttaattcaaaataaaaaagttgttatctttctcgaaattacttttattatttgaaattttgattttatttctttcaaaaaaaaattgtcaaatattatttaatgatcgatgttcaaatagattcttattgcatctaacggaattctattgataaacacagactatcatataccaactcaacaataagcacacaggttgaattgtcttgtgaattgggttggattgcagaattnnnnnnnnnnnnnnnnnnnnnnnnnnnnnnnnnnnnnnnnnnnnnnnnnnnnnnnnnnnnnnnnnnnnnnnnnnnnnnnnnnnnnnnnnnaaaaataataaagaattaaaactagagtttaactagcactcacactgaatataataaattcttacattatcaatttattataatttttaaaatagttattacataagtgaataaatttatcatatatgatattttcaattaggtgatagtaaaaaaatgtattttcactatactccatcttgtctcaaatataagaaaagaaaaatacatttttcttgatctcaaatataaaaaataattaatttatcttatttaatattattattttgaaaatattcttcatttaattaagatattaatttgaatgactttttctttttaatgaaagataagtaaaaaaaattgatgcaattaaatgtaattaactaatttttttaattagtatgttgtattttttttatttgagacatgaaggagtagtctatatattctttattattaaaaatattattttactaaaaaatcataacatttaatattatcaaatttttttattatagttttaatgaaaaaaatattattattttcttagttatttctttaaggaaataaataacaaaaccatttccatactcgctccaccaacgagtttcctataggggtgttcatcaaccgatcaaaaccaatacaaatcatggtgaccgaaccgaaaaatcgataactgaaataaccgaaaatcgaaaatcaaaaatcgaaaaaaaatcgaaatttttcactggattggatcggttttcggtttggctagtgaaaaccaatccaattataaaccttaccttaccctttacctacttgggtctattccccgtcatagtccaaaaatcaaaaacccaatacacactaaaaaattgctcctttgtccttattttgttcaataaacgtgtttgtccaaggaaaattacaaaatgatgtttgtttttgtccgatgaatgtgtttgtttctgttagatactctttattttgataaaaataagtctcataaattttattttagactttttaaaaaaccgaaaaccaatccaatccaaaccgaaaaaaattggattgaattggatcgaatttgaaaaaaatttcaaaccgaatggataatcaaataaccaaactgaagaaattggatcggatgattttttgcttcaaaaccaatccaatccagaccacaaacacccctaatttcctataataaaaataatttttgaatgaatccaactatctttcaaggcgaaagtcaagaactatattaaaacctaattaagagaataaccttttttaaataaatagttttctatatgatcaaatttaatattaaattcctaattacatatttaaaagataaaattatttatcaatcatattaataaaaaatatcaaagatcataataatattataaaagtcattttttatcactgtaacattaatgtggagttcccacacaagttgatgaaaaatacttggtttgggaacatattaatttctgtacatatttcaatcacattagagcatgtatggattccgactgcttgggaattatcagttttattacatatttcgtaaccttcaaaaatacatttacacacttgtattttgtctaaaatgaatttctataaaaacaagataaaagtttttttttcaaactcaatttacaaaacaaaaattatgtccaaaataagttttccaactttaacccaaacatgattcttttcaactttaacccaaacatcacctaatcgtttaaaaataattccatacaaattaattctacttaattttaaacgcaacgtctcttttccacgaagccaaaaaataaaattaaaaaaaaaacacaaaatctaaataaagactagtctatatctctatccaacttaatccattattttgatgaaagtaaagttaaaagacactttgaaaccgacccaacatgcagcacctatcttcaaggagagaaatacatgaacatgaaacttgaatgtatccgtactgatcttgaacaaagctttcacaatgttataacatcattaagaataggataatttggatttattccttacttacattgtgtgaaaaaggattattttaatgaggcacaactatgaagagacatggatgcgtggatttgttctatggaagagatacgtatctttttgcgtatagaaaattaatggaacattggattggatgattgtaaccctaactggctctggctggatgcccatgtataacagatcccaacgttcctatagtatagcaaaaattgccatatgtaatgagatgaattaaagtgaacaagggtaaagaacaccgggaaagagaaaaaaaatttaaacgtgtttttaatctctataaaattaatcaatattttattctggttcttataatttttttttatctttctaaaatttgaaatcgttattttggttctagtaaaatgagtgattttttttccctgaataatgaactttagttttgattcctgtacccttttttttttaataattttgatacctctaaaatttgaaacactatttttgattgcctaacattcattttaagataagtaaatatatttattttagggatattgaaaagaattctatatatgtcaaatattgatattgtttcatagatattaacgggtattacttacatgagataatctcttgaccacgagtttagttccaaagacttattaggaccagggtcaaatctcaaagttcaataaatatataaaagtatttataaattaataaagttcttatattgatgacaaaaaccaaattcagattattttaatctttatatgcatcactcgttcaatatacaagcagttaacgaatgtcattcggaaaataattatttacaagtttagaggtacaagatcaaaatcagaagttactcattttacagacaatgaaaacatatataaaccttaaaaattggcaaactaattcttttagtttaaaatatttatctcactaatcacctgtttctctttcttttctactttttttaattaaaatattttaaacaaagcaataataagaagactattattacttgtcattttttaaaatgatgcacctctaaataaggctacaacacctcaattactggaaaaaacgactgctggtatagcaagtaaatattcatgtcatcaacaaaacttgtctagtcttcattctaggtgctagcaagggggtagattgaacccttgtccattattaaaaagccataagtgcagccatcaaacatagtactaatgtgtatgaccttggaataacatccactgaaacttgagtaatcgagtcattctagaaagaaaaagacttttggcggagagcataaggaattcataattattcaactgtaaaacagacccttgcaatagcaaaattgatgctttccaataaaagcttcactcacattcaaaagccaggcctctctaaacgaaaccatttaattgaatcctaaacatcaatggcttgagtgttggtagagacaattagtaaaatagttcctctagttctatctgactctcacttttctgcttcttaaagagtcaccaaaattattcctcccaacaaataagaaaaagatatactttatttgggacgtttaggtactatttaaattcaataattagtgtatagtgtgtaacgatatcttttaaaaataaataacatgcttcaaatcaatacattttctgatcaattatgagtaatttaattaaatacctataattaatatcgataatggctataccttaacaatttctggtgataaaatttgactttggaaatatctttgtcccgcctcatcatcatttgccaatgaaagtgggttcattcccccaccaaatcccatagcaaggaataaacaaaacagcctttatttttcatcaacacactgcttcgaaatggacacaatttcgaccataattaaccgttctttgtggtgggtttaatcaatgcatttacttaaagttgctcagctactcaaaggtaaaaataattgtggaacccacctctgcaacgccacccgaaaaatagaatttaagactttcactgactgtactgtaagtaacttgcgtatcttgcttgccaaaagtcattaacctacaaggaaattaaatatatgataatttttaaaatgggagatttgaaagttttaaagaaaaaaaataaggtaaatcgtttttaattgttggtgaaaaaaattaatattttgatatcatcacaattcatattatatatatatatatatatatgacattaataattaaaattacttactttatctttcaagaggagttactcattttagaaaacttgacttttattttttaatttaagatcacatatacatatacatgcatcaatcacaagaaattttttaactcaagttagataaaattattttataaaataaatttcttattttatgtatttaacacgattacatgtcagaaaacttgaatctcagtcaatacaatataaatattaatggataacaaaatgtttacactcattttcattcaaactaaagttaaaagtaaatccaacacaatatttgattcactcattttcatccaaaatgaagttaaaactaaatccaacacaacatttgattaatgctaaatgaggtgtcacttaattttaataatttgttttttttacatatttaataatgcattttaatctcaccaaatataaaaattatttttttcattcatttgttatataaacagaaaagaaggatctagttttgtcgaaggttttggaacagaaaatttgctcacctatcccaaataattaattgtgtcctggcaaatgaaaatgattatattacaatatatcttaagtggacaatgagttggagttggagtacttgaaaaccttccctgatccccttcacttttcttatttttctgaaaaagatattgagcactgtcattatttaaaaacaattaaaggtagtgatgattactagttccaaattatgtaggagtaggattagtccccacattgatggccatacgtgtgatgcatacatgtcatggtaatacaaacatgatcactagatatcatgggtcatggcctttgcaaattacaatgttgcagttctccactccactttgttctctctgtccttttcttgcctagctttgatagtgatcgatattaactgtgcacattgcatactgtagttaattaaaaatagtaatatttttatccaaatattatagtataatttttaagtactttttactttaatttttttaatcataccctgaaaacacttattatcgtttgcgttacatttatcttaccctaccttcacaaatcacaattattgtttttctgtataaaatcggtggtttgggttgttgggattgttgcacgacttattgcctgatttattggtactgcatcatcagattaacagtaacaatgaaagccacagtgaaactatcacaataaaactctctcctacccccaacctccccaaacaaatacagtttacttcacctaaaacaacatggacaaggctcgatcagttgattgctttgggtgaaattaaccttaataaaattaaataatttaaatgtaagtaattgaaatatgtgctttatttctattaaaaattataaaaaataatttttctatgataaaaaagcttacacactgttttcgtgactttgtatgctaggccaagtaacttatatgttagtcaaatagcttataaattaatttagtatattaacaagcataatctttaacatgacttcatcaatatgatgcgatcgtaattatttttagagtcttgctaatgagtaatatttctataagtaaattggaattagaatatattgatagtagaagtattttttacactattatttgattatatattagcacttatatataataagatggttaaattttataataattattattaaaatcatatttagattgacttctaattagttcatactataaaaatatttacactagtgctacataaaaaatagttaaaattaaataaataaaaattactactatattagaagctatgttaatatgcacaagtaattgttagaatatatgatttttttgttgaatctcaatattgttttttttttccgttaaatgaaaatcttaggtgagttgagtctcagaattattaggattatgacagatccaaaaacttaagtttatagagatactaaaagattatttaccaacaaaattcttagattgacaatgaaaattaaattctcgttattgtgtgatataaatatattctttaccaactgaactaatatttgttgacaaatctactatatatccagatagatagagtgaaagaacttttaataatttcattagtttttcttaagtgttttaaattcggatccataattgaacctataaaagtatgaagaggacttttatcctaaaaacatactatcaaacacatcaatgcattataatacacttaattaacagtagtatcacttaattttttattctccctcatctctctttctccttttatacctagataaaaaaattacataatttcatgaataacattaaatatatgttttttatttggaatttaagcttttttttggtttatttggaacattaaatattacttttttaaaaaaaaattgacagtaaattactatttttttaagtgaaatattactattctttattataagtacttttcatttttgtaattgcttgattagtgttcttctaacgctgctagtattctctttgcttgtatcgattgcagacactactacaccagtgataggtctgattataaacacgaccttccaagagtcactgctactcatcagttatttatttatttttatcatggttaatcaaagttctagaaacccgtgacaatttggttagtttggatatttcttcaaatttatatgtggaatatacaacaagctaagcaatagtatcatattatttgagtgcatgacattgaggtttaacttttcattcgaatttaataaggccatagggaaagaaataaaattcaatttgttgttttcttaaattccaaattccccccaaccactaacagtcaaagacatctttatctcaacctaaaataagaggaggaagtgtttttgaggcagataataatttggcagctaatatgctaacagtattacatggtcccttcttatcaatgaattaatattgaacttgcaaggctcaaatgcatcatcatcagaagttaagtctattagaaaaccaccaaatgccaggtacgtgtactcttgcgcaataatattcacaattggtccattcagatataatactgtttgatagctgaccaaccgaaagctttacatggatttgatacttcgaaagcacgattatgttgatagcaaggtaggtcagattatacgcatattcttattttatatgaatctcttatgtgtttggagtgtcataacaaagggaaaatccaaaggggtacaagaatggcataagatgataagatgccacatctttcattttcagatgtatagtgtgatagcttagccatgaattagtgagataaagagagagaagatacttaacaataacagtaacagtcttgttcgaaatacacgctgttcaattttgtttctgttctctcaagtcaatctccaaatcataggtccacaaaaactgtttttttattttaattataattatatttattcctctactatccttgacaaatacattttttattgagtaggtaagattttattcacttttttgtaccatctaatggacaaaacatggaagtttgtctaatggaagaagttctgaaactataaaagggaatcagagagactgtctctagtgatatgaaagttgttgaaatgttgaatatctagaattaatgtcctgtatagtttcaatttccatttcttcaattttcaattgtatggagcacaaccttagagatatatgataatttggctattgtagatgactgcaaaggtaccttagtggcatagtgtgttactaatatgaactacaatatagaaaaactggagacagtgtccaatttcaattagaatgatatgtggactcaaatcaataatctcagtggaattgcagctggcactgctgagtactgaaaaaggtctcatcgacaattcttcttatgtacctctaccttagttttaacaggaatgtctgataaaaagagatttaccaataggttaccataaaaaccattcaaacatgtttaatttagtttaaattgtggtaaatatgatgctctctgtctagccaatgtcaattatagatcttagagatgaaaaaaaacacacagctaggactagtaacattaaatgaattcataatctcactgtaacatgtcaatcaactttgccccaaagtaaattattacttttatgaagcctattatacaatacaagtgcttgaatgttaatcaaatccccacttacagaaaagggtaagtaaatgttacactaaaacttctgcttcagccttttcatgatgaccggtcataaaacagaaacacttgtgtccatgaaataattgtacctgttattctgcatagtgttccaacactttttgactgctgccaaaattttcaatcaagaatcttcttcatcagactcaaactccacctgtaagtagactaaagaaattagtggctatatttaatatcacaagagatttttttttttaaataagaaggtatctttaatataagaaaataaaagagctacaaatgaggtcttaaaacttcaattaagcaaatgctgatcttcagtatctcagtcagactttgaatccaaagaagcacaaatagacaacaattgctattgttgtttaatcatctgagcttataaaagaaatattcacaatttcatcctgatactattttccctgtataatcatgctttcaacctgcatggataaacttgagttctctttgtctactttcccgaaaatccatataatgcagcaagtgtaaggccaacttgtcagtttcaactttccactaccaatagtagtatagtattgcatccaatgctgatttcaatttatcacttcttttttaatgatttgttttctgagatttttcagagtagcactttaatagcagacttctagtgccggttcaatcaatggcccagaagaagcgaacctaaattttttattttagcaactatatttggcaatgacagtagaagaatataatagtaattccttaatattattctgttatatttctatgtttaatcggttctctttctttctttcagccaggacacaacgtaagtttatttattcctctattatcataaaagaagccaaattcagtatagaagctacaaatgtatttgtcaagacagaaatttgttggtctctcgattgaactaacctgaagatatatacccggccctatgtatgatacagcgcggaaaggataatgaatattgattaccactcaccatttcttttttatgaatggattaggaagttgtaactagatattatcttaaaatatattaatgatgattaacacacatatacaaaaaataagagtgtgtatgttaacaaatgttagtatatatgttaacctatacacgttttttaacctgagtgtgtttacaaactataactatatattgttttaaaatatatcatggtgattaacacactcatactaaaaaaataaaaatgatttggtccacaattatgatcacatcagtcgtattttttgtaatataaaagttttctgattcaccatattacaattgcgattgtgacagcaatttaaaatgatgatagtaactaataaccattacaaccccatacgtacgaatgttcctcagtaaacatggcaacgtgtccacattataattttatagtggtttggtccaacttctgcactagtggagcgtgatatatatggtacaacattaacaacggagaggagctggcacgtgctacattatactaaattggtgctactagtaattaccaattgctgcattaaccacccccacacacctagccaactcaatgcacaaccaaaactagctcccattctttgaaacttcaaaacattcacaagattactgtgtcaagtcaatgccctcaattcaatcccatgctccacaacatttagccaaaccacatgaagccaaggcccctttgacgacgcattgataaaaaaggttattaagatgccaattacaagttcatgagcttactcaaaatatagaaaaatagacaaatataaatataaaaaaagtctaacaacatactaatttataatatcaaacttaaagaataaatagataaaagggatttatagttacaactaaaataaaggaaaagtaattaaaaaaaagacttagctccatccgggttcatcaacctcaacttgcaggttaagtgaattacatgggaattcagggtgatcttccgcattggttttaagttggtggtctactgaattttgcagaaaatgtatatatctaaaaccgatagtggaaatgttcctagaaattctagcatgctgttataatgattttaggttggtagcctgaaatttatgtatgcatttcaaaataatggtgaaaatatttctaaggcgtacattaattaattgctattttaagaacatgtaattatttctcgtttcttatcggttagacattgatactaagctagtttcctcttttcttgttttaaatctcagtcattattattaaaagtttagcaaaccttattaaatgacctttacgttttaaaaaataataataataagatgatacattaattatccagtttcattgatgttgagacaattggatggacttcattaattcaatagttatgatagcttctagctagttaaagcaatatttgaccaaagcaaaggccaaagctattttaagaacatgtaattatttctcgttttttattgattagaccctgatattgttccctttatatatatatgtataataataattttccattattattattattaaaagtttaacaaacctttaattattaaatgaccttgttacgtgaaaaatactactatatgatgatacattaattttccagtttcgttggtattgagagacaaaaatagcattggatggtgacaaacatgccagaatcagacttcataaagtcaacagttcgtatggcataattacaagatatactatattgcttataattaaagtattattatttgaccaaaacaacgccaatgttccatttaataaaattctagtgaccgtttatttttagttgaaaagtttagtgaataataagtacttatgataaagcaaatcgaacttcatcaattaatgcgtgaggaagtgaatcaaacattattgccaaaaacgatcaattaatttaaaagttgacaactgctcaactacaagcctctcaatgtatactatatagaaagttacatctgttaacactacagaaacattaaaaagaagcctgcttcaacatttattcaacctatatatccctataacattattattgcaaaatgcatcacattaattagtatcttgaaaaagtataaatattaatagaacaaattaacaatacaacttgctttatttgctggagtgtatatattgtgggggggaaagtataataaatcaagcactagctagcttgttttgtatgcattaattaataattttctcgttccatggccagaagggacgaagcattggcatcacagcaaatttcatctgtccattgttgcaatggaaaccatttctctcaccgcaggcaaagaaataaggctgccacctatttatcacgaaatgaaagccctctcctccaccttgtgtgggatttgccagcatcttagcactcttcacatcacaattcaaaaaactccagaagtttggaaatatgtacacgctgtgtgggaaactggtagggtttggagcatcatacttgaacactataccacaaatttaaacgcagatgggtatcttaatgagtattaaatataatgagaatgtatttggtaaaagtgtagaagatttaattttgactatataatatcatatatagataatatttttaaattagcgtatctcttggtagacactcaaaagactaatcatttgagatactaatattcatttaagggattgacttctcccaacatatattttttcatacaatcgtatatagattagagtaactcttctcatgcttttattttccctttatatatgtatatgaatgttttttatatcatattgtgtaaaaatgttagcaatattttatctaacatttattttctagcattctctttattattggttaaatttattggaaattgtaatttttgattgaatttcatttctaaatctaaagaaaaaatcattaaacaaaaaataagacttaccaaaatttataattgctaataatttttagcaaataggagtagtactaacatttctcataatgtatgtcaaaatatgtgtatatatatgcatgtaggtacttcaaccatagttttgacaaataatgaagaaaatctcacctagtgtatcgttaaggtaaaatgggccattcttgaaagcccaatctgtgtagttaaaaccgaagtgccaaccctcagacccacccacaatgatctttctgggttcttgttctgtccttttttggggacggttgcggaatctggaccaccaatcagagtagttagaaggaatgtgctttatacaccatttccttttctcatacaccatttgttattttcctaatacccaaaatgacctcttaatgaatgaaaaataatatataaaggttaactaaaaagcaactgagagagagagctgtgagctgccgttcatgtttgcgatccattgtttgaggctttgagcttgtggcattgcttggaatcgccattcgtgaggtcgttgtaggtgtgcgagctgcagttcgaggtttggtgtcgccggagaggaagcgcgaaagttgtggttgaggtaagcagtattttcaactgttacggattcggtaatccgtagcgtaatggtgcatgaatttacggattacacaatccgtatgagctatacggattggtcaatccgtatagaccatacggattatacaatccgtatgagcaatacggattatgtaatccgtatagcccatacggattgtgtaatccttatggtctatacggattgaccaatccgtatagctcatacggattgtgtaatccgtatagaaagacagctaaaaaattaatgaaaattaaaatttaatgtgaaaattataacttcaaatattagtaacgccattttaatataaaaagtaattcatacaaaatagatggggacaaaacatcagaaaaatggtaaccaacaatagctaaaaaactagagataggcatgacatgacgttgtaacaataacatttgacaaatgcgaaataagcaaagtaatcatcgttgatcggttatttaggtttcttgggtgactaggttgttgaaaatagctaggatttctattggaccaaaacgtttccagtagttggattcggctaagacctttaacacatcttcatcgcttatcaactcttttatgtcatattggattgtgttgtctgaataagcatagtgggatggttgtcgaaaaaataattttctgaccacctgtgagttgtgtattccataagggggaaccccaacatgtgcaacttgcttgatgacatccttgagtgtttgaatgttgcatcctgagggtatttgaaacctttttggatttgttccattgaaagaataacccagaccataaccgctctgtcgtgttctgttccatttgccgttgtaatataacattgcaccatgtgttcggccaattgtagattgaagtaagtttagtataccgtcggctgttctgttgattgtacaacatatttctataggaccaatagttgacattttctcactagacattaacattgtgcaaacatcatcatcatttgttagttgcagagaatgaaaaaaaatttgctgacctgcatggatagatggttgtcgatagtacatttcatcaacaaattggtcatgggttagtacaagtgtgttgtgaatcctggtcttcagtgcatgaaaagaacattcatcaggaactcgcattggcacaggagtagaacattgaaaagaaacaccagtttcgtcgtgtttgattgatccatttggaaaaatgaatgctaatttggagttagcaatggtctgagtgctggtttctcctaagaatgccatagttctgagtgattttattttgcagatgtatgttatgtgggagaatgacaaaacaagtagggtgtctgtgttatttatagttgggtatgtgatagcatgtcgttattgaaatttgtattttatcagatacaccatgtagcatgtcattattgaaatttggcttttattaatatagtgatcaatatagtgcatgatgtagtcaatgtggactgacattaactagtgacatttgaccgttgcacatggtgtgtcaggcatgtgtcatttgaccgttgcacatggtgtgtcgaccatgtgctgtctgcagttttttggccagcagtgttgtctatgtcgttaagtcagtttacccttgcacaggcctttttattaactgtttaatgaatatgatttttgtgtggggttttaacgttagtcaatgttattatttaccgtgtatgtgtgtgtttttacatggtatgttaagttgtattttcttttgttagaatggacaacgatgagtggatgtacgagagtatcatggctgaagatatttacatgaatcaagacattggaccagaccctgatgactttgacgacaaagattgttttattgattgttctgcagcgttccaaacaaatgaggtgagagtgtggatgacctacaatttaataataggaatgtagtttaagtcgttaaacgattatatttgaaacattaaatatcaattatccttttgtgtaggtgtttgaatcgcgtgatgcggtattgaggtgggctcgtactgttgcgtctgagaatggttttgtggcggttatcatgaggagtgacaccaagaccggtaaaataggaagaacgtcatttgtgttaattggttgcgaaagaagtggaaagtatagagcatggaaaaaaaggttttttaccttcaagcacaagtagtagaaaatgcgagtgtccgtttaagctgcgggccaaaccaatcgcgcaaagtgaagggtggattgtgaaggtaatatatggtaatcataatcatgtaatggccaagtcattttgtggacacccatatgttggccgaataactgttgaggagaagacaattgttgctgatatgacaagagcgatggtcaaacccaaaaatattttgctaaccttgaaggagcataatgcagataacgtaacaagtttgaaacaaatttacaatgcaagatatgcataccagacgcgtacaagaggtgataatactgaaatgcaacatttaatgaagcttcttgagcgtgacatgtatgtacattggcatcgagtgaaggatgaaaatgttgtgcgtgacttgttttgggcacatccggatgcaatacaattgaccaatgcatatcatattgtgttcttgatagacagcacttacaaaacaaacaggtataggctacctttgcttgacattgttggtgtgacacctactgggatgacattcagtgctgcatttgcatatttagaggcggaacgtacgaacaatgtggtctgggcccttgaacggtttagagggatttttcttaaaagtgaatttttcccaaaggtaattgttacagacagagatttagcattgatgagtgcagtgaaaaccgtttttctagaggcaaccaatttattgtgcaagtttcacattgagaagaatgtgaaggcgaaatgcaaaacttatatccgacagcagaatgcatgggattatgtcatggaagcatggggaagtgttgtcgactgtgctaagaagaatgaatttgatgattatgttatgaagtttgaggttgcatgtgctccgtggccaacgttcgttgattacgttaaggacacctggttgactccccacaaagaaaaatttatgacagcttggacaaacaaagtaatgcattttgggaacacaacaaccaacaagtgactttccttgtcttaaattatgattcgcatatgtataaattcttttaaattaattgtttatattgtaaattgcagggttgagtctgcccattggacgttgaagaggttgctgcaaaatagtcttggtgatttatgcacggtttgggatgcgatgaacaatatgataaccttgcaacatactgaaatcaaggcatctttggaaagaagtacacatatggttggacatgtttttaaagtgacgttatacaagagactcattggcatggtgtccaggtatgcgttaaatcaaattactgctgagtatgagcgggtgtattatgcgggaaaaaacccatctcgttgtggatgtgtgcttagaacagcgtatggtttgtcttgtgcatgtgagttatataagtatgttcttgcaagcattccaattaacaacgttcgtgtgttttggcggagattaaacttttcggataatggtgaagatgaaaaccaagttaccataacagatgagatggaagccatatctaatcgttttgagaagcttgatttgtgtggaaaaataacactaaagtcaaagcttaaagaaatagcgtttcctgataagaattccatgtgccctccagctgctaaggtcaaaactaaaggtgctcaaaagaaaaacatctcaaagcacaaacgttcgacaagaagggacccgtcttacttcgagtatgtcgatgagttacattctgtgcagaacagttgttctactcccgtacagtgtagctcctcatctgatgttctaatgaggaaccggatggttcctatgctcgatcaatttcatccatttatgcagaaatttattgttgacattactgatgtcaaagctgatggaaattggcgatatcgagttattgcttccttattaggttacggtgaagagggttggtcattagtgcgcaatcatctccttaaggaacttgcacaatggaccgatcgatacattgcgttgtttggtgggatacataggtttgaaatgttaaagcggtccctattagttgatggattgtccaaggtgaaaattcatttttattttatttaacattatttgccaatctgttatattatccatgcatgttttattaaacaatgatgtgcaggtaaccatggagaagtggatggatatcacagacatgggacatgtgattgcatcaaggtataacgtcgtcctagtatcgctgtcacgacaacaaagtatgacctttttccctctgaggggccaacctcctacagatccacgggttcatcgagttttgtgcattgggcatgtgtttggaaactattttgttaaggtaagacacatcctgattaatttggatgcatgcttgaaatttaatgtatcatactgatgatttgtgtaacaatttatatcaaacaggtaactctggccgacaattgcccattaccattgacggcatgtttgtgggctagtcactgtacaaccgaagctcagcagtggccttactattacgttgatcgaatgcagttgtatacgaaatcgatgaagttacgcacataatatgttgatttgggaaatgtttagacactcagttgacaattgaaatgtatgcgtttacttgtttaatgcatgtgaatcattaaaaacatgttaagtaagtaaagaacgaagtaagtgcaacatcatgaactatactttaatatcgatcaaaatatatatcaatcactgtaatgtatatcgaggtgaaatgtatacaactaaaagcctatgctactcaaatgtatctcatatggaataatcaatgtacaaaaaaaaatatagatcaaagcctatgctaatcaagacgcctcctctgtggtcggaaactccgtcgtcctctggtgtagacaaggccatcctcagtgacgcctcgaacatgctgaagcagctgctctaccatggtccatgcatctgtgccttctgtcaccatcctcatgtcaagcatatgctgcaggccctctgcaacacgttggcacgcatgctgcaaataaacaatacaatttgcttaataaactgaaaatctaaaatggaacaatacatacttatcaaataaacaataaataccaaggcatgaagtggtctctgctcatgtccatccgtggctggatcagaagaaggaccatgtccatcaaggggtgcatcagaaggaccatgggaatgggtcggtgcacgctgaggcagtggtggaatctgggaagtcgcctcctcatacgcagatggagtcatgaatggatgggacatgcggaagaaccagcccatgtatgcagcaccacagtgagctggataatcaaccaagtctctagtgtccacaatgtgctctgcaaagtgaacccacctctcgtctatggcctcaacagaaggaacatcaggcacaggctggggtggaatgtgctggacatgcccaaactgcctaagcaccctctcaggtagatacctagtcaagtgaggaccccatctaaggaacccagagaatagactgatggattgaaactccctgtgcggcctatgctcgacgtaaggtgtccaacagatatcagacggtatcaacctatctatacgtctacgataggttgccaccggtaaggccttcgcactcgtccacctacaggatcgaggctgcctctcgtcgtactgctcgtctggaacgacatttcctatagtaggaaaatgcttgtatatccagcactacaaattttaaaaaatgcaagtcagcaaataatgaaaacaaaacacactgataaaatgaggtttaatcattacacacatcaaacgatatcattacctgtaatagactgatgtagcctgcaagatgtttctcgtggtgcttacatgcgtagctcaagttctcatacatgtgaacaagagcagccgcaccccacgcgaaccccgcagaacgattgaagtctccaaacgcctccaagaatgccacagctatatgtgtggcactcttgttggcgaacaatgtgcatccaacaaggtgaagtagatatgccctgctggctacgatccactgcctcgcctcgaccttcgcgtaataagtgtcccggagccatgatagtctaacataagccccatgacactgggatgtctcagctgcggcctcctctagagtcacatcaagaagctccaccaacaatgtcatcgcctcgcccacgtccagctggtagtacgagtcgaatgtgcccataacagggagatgcaacagtgatgacacgtcgtccagcgtcagtgtcatctctcccacgggcagatgaaatgaacatgtctcggggtgccaccgctctacaaatgcagatagcaaccccctatcaccagtctccactgagcatccgatcaacgagctcaggccagtggcagccacaaagccctcaatctcagcagcaggcttcccgaatttaatgaccttacggccatgggaagcaagcttcaactctggacgttcctgcattgtacatattatgtaaggtaaaacattaatggggaaccaactgtattacgagattcgactatgtaattgaacatataaatacctctccggcccacacgcgtagagcgacatggtctgcaaactcagtcaacaaagatgaatcctccggccctccagggaaagattcggacgttgtgtccatatcctcagtgaccggattagtcgtctccacctctggctcctgcacaggaggatcatcatgaatggcaacacctgccctgcgacgacgcacagatgcggtaggcctacgcctctcaagggcatcatgctgatcccctcctccatgtgtagtcgctgaacgatcaggacttcggccaacaggccgacgcactcctcctctagtcctagccataatctgcatctgcatagtgaatttcaatttttcagcttcaggaacaacatcattgttcacttgacttgactaaagaattgtgaccaagcataaaaaagtaatgcttgtcacaaccatgctactatattactataattgtagctaatcttagccatgcttgtcacaattgtgaccaagcataaaaaagtaatggcataaaaatgactaaagaatgggccaagctttgaaataaaactgcatagttggtaattttggtgcttttctagttgttaaattttgtggtatccttgcataggccaatatgggactgttctagtggttaaatttggtgctatccttatattcacccaatatcggactgttctagttgttaattttggtgctaataatcaagttaggtttctcttggtgttgcttcaggaaaacctgatgctgggctaagattatgagcattctatatgttgaggggtacctatgcacctttgtataccttgttacttgttgctaactaactgatcatattggtaactggagcaacatgatttataggtagcaggttcgtgcacagtgtcagttgttaagctaactaactgtctcaaataaaaatacttgcatacattcacagtgttcatgtcttcacaccatctaaatctaaagcagaaacaattttttcggagtaacaatgtaatgaattaatgctacaaatctgcactgacacttacacttccacaacatattgcctattaatattcattcgcaactgcaaatcttttcaagagatatcaaagtactatagattttgttggtttcaattatacaaaatttggattcctccatcatgtgaatcactaacagcatattaagggttcaaccactgcaattcacaagctgtctatacattcaagtcctactctaattaaaaccaaccaatgcatattttcaacaactcatcttcgcaagcatagtcctattctaatcataacaacacatcaaacatatgttgacatgtttttttttttaattatttttcatttttttaaaaaaaaataatttttaactgcataaactctgttacagattgcaggatccgtatgaaccttacggattggctaatccgtatcaattatacggatcaaccaatccgtaaggttcatacggatcctgcaatccgtaacatgggcacggattaagcaatccgtaggtgatccatgaattaggtaatctgtaagaagtttacggattacctaatccgtggatcacctacggattgcttaatccgtgcccatgttacggattgccggatccgtgtccgccatgcccgaccaccagacctccatggacggcgattcacaagccttaacatacaaagaactcaccagggtgacgacgcggactcaacggttcaccacctatgcaatgtgattgtcgacaaagctccaacaatgtccaatgctgtggcagcgaagaaggaaccgaaaacgaagaagggaccgaatgcaatgcgctcagggaagaaggcaaagtcaataatgctgcaacagagggaatagcacagcaaagtgaatggggtcagggaagaagaactttgtgtcgccgaagaagaggaggaaaaaatcgaaaacagagaagagggaaagggaagaagaaaagcttttcagaatattatataattggatttaaattaaaggctattttgggaatttcactgttaaaaatggtgtatgagaaattttttatggtgtaggaagctcatcactagttagaattagaaccaaaggaccaatccttattggccatggtcattgaaaacattgaggccactatgacaaataaagtgagtgcatgagcaaacttggttgccatatgttcgatcgttcttattttagcaatgagtgcaaacaaacaaggtttgataaaacaaaaggaaattaaatcagtaaactgagattattttgacgtgttttggtatgagcaaagatggttaatatagtgtagagggtttaggttgattataagtctgtttggataaacttctttaaaagtacttttaaaagaagaaaaaaaatgagataaatttttacatgagtaaaaataaattttttattaactaatttttaaaaactcacaaatataatttctttaaaagatgacataacacatctacaaagaaattaataaaaaatttattttaatttataaaaaaatttattttatttttttctttcttttaaaagtactacaataaaaaactttcatccaaatcaatatcactaatgatggtggaacatgaaatatgaggtggtgcgaatctgccaaattacttaaccttttggtccaaaatccaaatgaatatggattggtagcaacagtgtgtgaaatgttttcccaagcaccgaggtcagtcctcctccacttagcatcatctttaaactcgtgcaattgataacataaattcatacaattttttcaatagcaaaatcttttattgagctgttataattgcacacactctatatattttatggtgtaaataggtgaaagaaataaaaaagagagaaaaataaaagaaaaggaagaaaaataatgacatatatgataaatgatgagacacagagaaataaaaaaaaaagtgagagatgaaataaaaaggtagatgtataaatagaattattctatatgtaaagaaaatattgggaaaagcttttttctttttatattttcctttttttattatatttccaattttccatcagaccgtcatcacctttaaatgtgttatattgattgggatatgaaactattaggacaaaaaattgtgtattaatatgatttctcttaaaaagctctgtcaaaacacgttgcagcataccattgtgaaaaggtgaaaagctaataactcaaaggtcatgataaaaaaacacttggataattattaaaattttgttaaattctagtttatgcttttcttgtttgaccccctccctattttattattttgaattccagaacaagaaatttcaccttcattcagcatatgaccccaatctcatttaagaatttgcttattgaccccagacgacttttatcttacgattggaacgccttacaagttaacttgccataaaaattctagacccaagaagtttctttcaacagacaaggttaacttggtttggtaaatctgtatctacatataaccaatatttttaatttcaaaaacgtgttattctcattttaattattcaaagactataaattaagaaaaaggtagatatgaggattagataattttcttttttaaaaattcttattagttggtttctaagttgatactacacatagtaaataaaacattatttttaaattctcaagaagaaatgcgtagcatcgtctataatcttatattcaaaagtgaatagaccaaacaataaaagagatacatccaatttgcaaaacaatacccacacacacacacacacatatatatatatatatattaaataagatcataacatagttgtttggttgagtagggtagtgagtagattcccaacatgtaacataaatgcatttttgtgatagaatgaaatgattacatttacataggttaagagttgtagcaggcttatttacacaggaatgacggtgtaaggttttgttgtattcacacaagtgagaataatctatttagcagattataaatttatatttgattctcaccatatgtaaacttttcttgagttaacgataaccaccaatcgtgaacgagattagtatctaacataatgaattggaagacacgagatcttttaccatataaaaaaaaattaataaagtattagtgacttatagtaccccatgagtttaaaaaaatcaaaaccagctgttacaaatttcaaagacaaaatgtttgaggctagatggtggattaaggtttccttattgagtaacctaagcatacctaatgaggtgttttttgaaattgatccaacaaaccaaaatgagcttgaaggagccaaacatgagagaaactcagggccttgtctgagttgctgggcatgcgtatcttctctacattaaccaccagcatagctcataatctcaatccacaaattttgaacgaactcccacgttgaaagtctatcttctgcagcaatgagttgttttgcgactgcacaagcatgaaacagaacagatgcactttgcatctttgactctgagtcttcatcatcttctgacgtagctgtgtccacatgttaaagcaatattctacaagtttcagctaaattatcttgttgtggagcaactttgatttgttcggaaaacttcatggcttcaactactgtatcacgaagagttatcaaccctgctcctactggcaacatgtgacgtttcttaaccaagatgtaaaacatataatcagcatcactttgcacttcttccttgtatctaatgcagaagaactcggttggtcctcacagtaataataaaacagatctgtagctaggtgataagtaataatggttctgtgaaattcgatttcacttgtgaaaatatgaacatctttccccaataaaagacatctatatccagggacgcctaaaggatttgacattttgacatcctctgatttatcccgcaagcatgttaagatcgaagatcttaaatcattggaggttaagcaacggctaacacttaagagttcttctaacttgttcgatgggaagaaactacccttcatcttaaattttttgttgcaaaacaaactgaagaagttggtctgtcccaaagaaattggaatctctccacccttgataaatactgccaaacagtctacacactcatggagcttacaaaaagctcctagacccttaattgcaaagaagtgcgatgtccatctggagaaggaaaacgatataaatgcatgtatttcatgtgatgatgtgatccacaccttggtgcttcctcgtttcacttgaattagtactatatgacacaagcacaacgaaagtggtaattagagtgattattcgtgacatgaaaccccaagatgccataattaatttgcaaatgccttggtgtagaagacatcatacatcaatttaatttcataatccgccaagtaaaaacgataatccgcaccggcgataatctccatgttcctttgtagaaatcattctctatcttgagtaatgtcacacgagctcaagataaatcaacaaagaggcttacaaagatatagatggctcgaagaaagtccttggatctcctatctgaggtcccatatctatgataatatccttgatattcttttctttaggcctgctatcttcccgttcaatcattctattttcaggactgctatcttctggcggttcaatcttcctaggagtatcgattaaacgaaggaaagaatccctaagatacttgatacttccacaatatatagaccaagtcctttcaccataattgatgaccccaataattagcataggaatcttaagatgtgaaagccaattacctttccaagacaataattatgtagacagtgaaggtagtttgggacaacaaaccaacaaagtgccttagccataactcattgtcttccaatgcataagctgtgattgtatcaggaccaccaacgtgtactagaaaaaaaggagcccaaaatgcaaaaagctgaggattcaaattatttggttgttcacccttgttgtaataagaatcttccacccaaaagtgttaatatgagttgtgacacaaggctaagtaaaatcagtcctcgtaactcccatttgtcccaccattcttgcatcggatctgggcatgacttgaactagtcttctatggacatccaagtgcctatcactgaaatatagaaaattatcctccacaatttaagaccaattaagctagctttcgttattttggagacgaaaataattgttgcgagcataaaaatttgagttactgataaataagaaaaaatttacatgaaagaaagagtgaatgggaccaaaaaaaaggttgatttgagacgtaaaaactaaaaacatactgtatgtttagtcggaaacttacttggaagctgtatcattctagttcctcgatcacttaataacgattgaagtatgagattaagcctttggtctctgtacaaggcaagggtagagggaatcttctgcaaaagaaatgaacacaatgagttgattttccaagtagctatagtgattccactatcaactacaatgatttcaattactttaaaaaagtttaagtatccatgtataaaagtaactttacaccaatgatctcaaatccttttaaaaaaaatcttattgaagtataaggagatatttaatccacgtaagaggataaattgttacaagatctctataagttcaccaattaagcttacataaatctttaacgcatgtaccaacgattaaaccccacgtacgttgtggatatattggcagcattaggtgctaacatatgttgaatttgtggtaaagaatttgagtgtaatttaattgacaatacacattgaatttgtaagaaatgacctagatttgattgttacagaatatacactcttggaaagaggtgaaaagtcttctaagtgtggctaagtaagtctcaaacctagtgattaagattgttgttaatcaaaaggtgcaacatcaggccatcttttcagtgtatgagctaccccaacctgctttgggattggatgccttttttacgttaaaggatatctatcacgtattttgtcctgttttgcttgtgttttttgcttttcagactcttaagtcattataccaaataaagaagtttttgcttttcatatctacccaagtgtcattataccaaataaatcacttaggacatctcttacagtaggagtttccttgtgtttcttattgattttttatgggtcttgtaaccatgtaaataaataagaaacaaagcttgtgtttttctccaatggaacatttctttcaagatgtctcacatgtgtagaacattttcctctttgcactgaatgatgcttgtaagtgtaaataaattagtttttaatttctaagcaatcctttcttatataagatgcgatgtttaattgtaagatacttaatttgccacctaaacaacctccaactgagaaaaaaaaaatttaagtaactctgatgatactaccataggagatattcttacataaatcttcaaatataataaagaatcttaattttgtaatactctaattttttaataactaaaataagagaaaaggggttcattccaaatactaatattttagaatttagttgtatttaattagtaaattttaaaatatatagaaaattttatataaatttgattaataaaacgagatttaataactataaacaattcagtttttttgtcattcaaataatatcaaaatttagatgcccctgaatgaaataaaaatttaaagagtaaattgccagtttactgcatgaaattatggggtgttgtcatagtacgtagtcattggaatttgaaggaaaaaaatgtcaaataaatctaaaattgaaatctgttaatcacatattctgctgtaaactccgttatggattcaatgcaatgataatgtgcacattacagatgaatgaaatgattaattggattgaaaaactaattagagttacaccgtctgtttatatacaagcccaaaggataactaattaactaacaactttcagacagattatgaatgtgttatgacacttaatgacaagttacggaagagtgaatctgctgcgatcaggtgctggagtgtgtgatgaagtttaatttgataacaattctaattgtattccatgtacgattataaaatagttaatgtgcttagctagggatgctacgaagaacgtactgaaatacgaatgattactttaatctatctcattctttatctcctttcttcgtgtcaaccttactcttagattttagtatcagaaataaacttttatttcattttctcgaagtaaggctgtttcttgtatatttttgtcactcaacccacaattcttcaatgaactcccacatttcatatctattttccgcagtaattaatgagtttttttgcaacagcatgaaacagaaccgatgtgatttgcatctttaaggcttcatcatctgttgatgtagctgtgtcatgttgaagcaacatcctacatgattcagctaaattatcttgttgtggaacaactttgatttgtcaaaaaaattcatggcttcagttactatgtcacgaagagttaatagccctgctcctactagcagcatgtgacgttgcttgaccaagatgtaaaacatataatcagacatctttttgcagttcctccgccttgtatctgatgcagtaattgacttgtcatcggagtaataaaacaaatcagtaacagtgtgccaagtaataatggttcggtgaaattcgagttctcttgtgaaaattggctcacttttccacgataagaatttcctatatccaggggggtctaaaagatttgactgcattccttcctttgatttatcctgcaagcattttatcatcacatattttatatcaaaagatattaagcaatgactaacatttgggagttcttctaacttgctcactggaaagaaatcactctttatgttcaaaattttgcaaatcaaattgaagaagttggactatccaaaagaaattaatatgattttctttccctctttgccatcattgtcaaaaagtgtaaatacacttggatgttacaaaatgctcctagacacttaattgtccatctgaagtagacaaccaatataaaggcatatatttatgccaacaagacaaaaaaattaaaatataacaattttaataaaaaaattacgaaaatactgtagtttctaaattatttagtattgtatatcaatcaatcacgtctgaatcagacgtgttcaaacatgcctcagccagacatgactggagctcagtcatgtcccagtcaggcgtgactcaccaagtggtgacacgtgtcattttgagacatgtatcattttacggcgcgatgtatatatacttcggaagtttataactttttactagaatgtccgattgaggcgaaactggggccacgtgcttgaaattgagaggagaagctctaagcaagtcccgagggcaaaaattttttcaaaaaatatctctaagtacctcaaaattatgatttaatcttcaaaccttcaaaaaaaaatttaatttctaattttttatttatttagttaatgaattgcatgttatttattcaattattgaaatgtgtaataatatcattaattaaacgtgatggagaaaaatagaaagaataatattaccaaagttattgtagaaaactattaaataattttaactctagaagtaatggatatatagttaattagttttatacattcaaacattggcatccgtatgtagcacaaaagcaccaattcttccttctgtcaggaaagggtcaaacatggtcgggtttttataaggtttgatgaggtcaaaaggtcagtgtttcttattattattgcagatttaacagagtctattgggtcggaaattttgtctacaaatccataaatatttagtgtttagtgacatagtataaatgagatacgcatggctttcgagtgatgtgttgatgacgactgggtggcgtggcgttggataactttaccatgataacatttttttagtattaaaaatgaaaattttataagttaaattgcaaaattttgcttttcatttatatttttctatattactacaacgtcaacgtttaacacgcaaatctccattcaacttcaacccttgggaccgacttgggactaagtggcttttttcttcacttatgtaaatcctcgcaataaaattagttcaattttttttcttcttttggttggattaaagagcatgtcatgacttttacaattgaatttgaagagaatccgtatgtaaaactacaaagagttagtgcgtttgaaaaacaattaaatctaacgtcaatggattttcagataaaagttataatatgtagttgttttgacattgtttctttgaaaagtgtgatttttttgttaaacgtgattctaacacgtatccaaacacatccttatatgttgacgtgaaatttacatattaaacgtgttgtgaaaatatgtttttaacccaaaaaatataatgtaaaatataagaagaatatctattatgaggaaaataaataaactacaatgaatggttctcatgatttcttatctttcacaactcactttttaaataacttgaatatattttttaattgcttgaatgatcgcctatttatattaaagtgtcatttaaattaatagtgtgaacaatgaaaaagaaaaatgagtaatctatgaatctgatttgactcagtaatttaattactttggatttagtttttaagtatttaagttgaattcaatccaatttgttcatgtatgagttcagttacatgttttaaattttaaacttctgaatctagtccttgaaccattagtaatttttannnnnnnnnnnnnnnnnnnnnnnnnnnnnnnnnnnnnnnnnnnnnnnnnnnnnnnnnnnnnnnnnnnnnnnnnnnnnnnnnnnnnnnnnnnnnnnnnnnnnnnnnnnnnnnnnnnnnnnnnnnnnnnnnnnnnnnnnnnnnnnnnnnnnnnnnnnnnnnnnnnnnnnnnnnnnnnnnnnnnnnnnnnnnnnnnnnnnnnnnnnnnnnnnnnnnnnnnnnnnnnnnnnnnnnnnnnnnnnnnnnnnnnnnnnnnnnnnnnnnnnnnnnnnnnnnnnnnnnnnnnnnnnnnnnnnnnnnnnnnnnnnnnnnnnnnnnnnnnnnnnnnnnnnnnnnnnnnnnnnnnnnnnnnnnnnnnnnnnnnnnnnnnnnnnnnnnnnnnnnnncaaatccaaattagcatgtccataaacactcctaatatatcgtaaaagatttacatcaatttactaaatatagtaatgcaatttaatctacaaagtaactagagccgtgtttataagttttgagacctaagacaattttttcaataaaaacttagcacgacatgaaaaaataaaatgaattgaagttttttatactataaaataaacttatgtacttaacatttttataaactattcttatctaacttctccattttattttgccttcatttttttctataaatacttatggagaaatttttctaaacataatcttaatgatttaatcttttggagaaattttaatgttttaatttnnnnnnnnnntctattaacaagaatttattaacattgaaacttttaaatttaactgttaatattactcactaattaatactattgtaaatattgttgctatgattattggccaacaatttgataattttataaacttgtaattctacacttgcacactttaaagccttgacattcatttcatgaaacataatgagtttattacttgacgtgaattaatggttgccgtattgaattagtatatgataaaattatttatgttttttcaagaaattgagcaagaaggaacttgagttgaagatctgatgttcattaaatttcttaataaaaaaggtgtacatatctttaatatagagaatgaattcttataaaagaactcttagatacgtaaaatgttcaaaaaataataattttttttctaaaatctcaaaaataagatttaaaaaagaaaaataataaataaaatttttaattttatgtggcaatatctctaatttatcaaaagtggtatcccaatttaaaatctagcctaaagatactttaaggcaaccaattagttcgccttgctgttatgctgtaggtacggctctcacggtaacaaaacacaatactcaattatatttttagttttttgagtattgtaattatgcaattttaatcctacaaatttcattttcaccaattaagcctttcgatattctctaatttataaataaatctctccatcctaattttatacaatatttaatagaattagcattttatttctgaaactttaatagaattagcatagtaacaaactgacattgttgaaattaaaaatcacatgtaaatactgaatgtaaaaattaagctagtaaaacttttaaaaattgactacttacacatgatttaaaatatcattataaaatacttcaaaacagaaacatgtctattaactatttgaataaaattttattttaatttaatacatattttaatctcgtgtatttaaatcgtaattgaaaaagacattaaatatatgtcttaaataattttaattagttaaaaataaatattaaaaaattaaatataataaataatttagttaaaaatacttttatttctttaatatgtacaattagtgtaaaagataaaaatattaacaaattttgtttattaagaaagtttaaataacttaagttttccatataacagaaatttaaatatcatattataaattttcatgcaataaaaataaaaataaataaaattacattttaaagaaatcaatagttttaaattgttctggtagcaaatagttataaattgttttattaattttgtttattaatactcttacaatttaccataataattcatatccatttataaataaattattttctcatgaaaaatatgattttattttaaatgtagttttataatattttatttaataaatattaaaaaaagtattttatattttaaaatatttttaatgtaacttttccactcgtatattagtttcagcccaaaaactgaatacaacagtaagtagctttatggtttctaagttctatccaataaattcgctacattatactttgagtgtaaaagttcccaacaaataacaatatatcaaaatcacatacagcactgcctggtccatcatctaaattacatttcaatatcaccgcccaataaaatgatcatagagtttcactgtaaaagaaaaggttgacaaaattgttggcttaaaatttcatatgtaataatgtaacaataccaatccttatccacttatttcatgtgagccccactccgaatacttttagtaacaataggttcaaaccttgaaccttttaccatatgtatatgctgcaacaatctggttgtttacataagcctgaaaagagagggtatggggttatgaactgctcatttgaactaaatgaaatatatttttgtccttcaaatttggggttatcttttttaatcctaaaaattaaaacttgcatttttaatatcttgaattcacgaaataccttttttagtccctcctacctgattttcggcggtttggttgaacaatttgtggcggttactgaccataagagcgactaaaaaaatattttgcgaatttaaaggactaataaatgcaagttttaatttgagggactaaaatttaataatcaatctatctgcaataatgcatcagcaattgtgacagaataactagaaaatggaaaacttttattgttgcacatgaatttctattcagatctaagatggtggccatgcaaatgtggttgttttcaacttttcatggtaattgatatgcctacacattcattactttatgtgtgtatatgtttagctgagagaaggagtcataccagagtgttattggaacatcttgctatatgcctttttctctagatcacgcctatcagctatctgaaataaacatattaaagttagattcccaactagtatgtaatgcttcaaggcttgttcaattcagatagatatggaccagtttgctacagattaaacaaaggtgattctgatgtaataagctagtgattattttttgaagatttttttttaaaaaaaaaagaggctaatttatgtttgtattcaataaaaaaaatcacctttttaaaagaaagaacttattttatgaaaagctatttaaatggcttatgattttaatcaaattttagattctttttagcttttgattattttgcaaagttaaaaaacaaacacaaaaaaaaataaaattattttttaacgaaaaatgattcttttatgaaaaaggttgtaacaaacacttatttacgagaaacatgacactactaaccttcttcctagcagcagcaagttccttttttattccagctgaaaatagtaagatatcagttaacctacaggaaactttaagtaacggaactgcactataaagtttagtgaatatggccataaacaaacacattattatcagttctttgcaaatagcccttaagttcattttatcttcaaattttcttcctctatattccccctcttctcataatctggatatttaatttataccttgtatcaataaaaaggttaaatccatattttaaataaaaaaaatgtgaaactgactctcagtaatgcatcaatagcataactataataaaggagaaatgcaaatatttcacagtaattaaagcacagaatgtatatggcaaagacatgacaaaaattgtatattcataactaaccatcatttggctccaaggtcagtgccttcttaaagctttcaactgcagcatcaatgtcatggagtgccatgtatgcctggtaaattggaaataacatagttaccagagttaaaagcaggaagcattaaataccatagtaacagatagacagacaaataagtgtaactaaagctccaaacatttgactgcaagttcttcaattccaataccaacctgtccttgacggaacaaagctttagcattgttgtctccctcacgcattgcaaattctgtatccaataatgctcctttaatatcccctaatttcaacttagaagccttgaaatcataacataacagaaacaattaagtgggaatcagaaaatttcagttaaaaatgaagactggcaacaaaactcgaatgaatataatagtatggtactataaaggactataagtgcactttgaagttatctgcagctgtgtacaacaaacataataacttccaacttacagagctgtttgtaaaaatctgagacttcgtttttctcagacctgaacttatctctgcaaaggcataatatatacgataatacattattatgatcaaagtaggtgagtcagttgtggcataaccactgcattgcacaaatagtagtgaaaggcagcataccttcatcaatgccttccttctcccaacaaatatccaggtagcgtaaagccttccgatacttccttagagccattttggaatcttgtttctgtcagaaaggaaaaaaaaaaaaaaacagattattttcttgctacaaagagttacagtagaagagggattactaccgcaaaaatgagcactaaacaactattaacagacagaacaaaaatatttcattcatatctcagaaaaatcaataaatctttatttaggttagggtatgaaataatacatcagaataataatctgagatggaccatgggaaagcaccaataccctgtaataatcattgccaaaagttttaatcgagtcaactgatttcatccaccactcaagttcattagggctctcatcaaggtctgctggccaatcgggataggtgtctccatctttgaaaaaattagatatcccatcatcttctccttcaggaatttctccacagtccacaattttaacatctagagtgggacgatcatcgtctccggtcgctacatgttcaattgatcggaccactcccattcctttaactactttcccaaatacaacatgcttaccatctaggtgagacgttcgggtagtgctgataaaaaactgagacccattagtattaggaccagagtttgccattgataacatccctttcctttcatgcttcaactcgaaattttcatcttcaaacttaggtccgtatatagattctcctccagtaccatccccagcagatatatcacctccttgaatcatgaagcctttaataacacgatgaaagcaagatccctgataatacaacagaacataatgcaaatttagtaattgacctgaaactaatatcactgatttattttttaggagacaacattttatggaagaagcattataagacagtacttatacagtgaacagatttggtgtctaatctctgtatcgcaagaaatcaactaaggaagttaataataagaagaactgctttgtccttttactttattataatttatattttatactgcctcaccaatatgcctcagaaataagtaaagagatgagaactatttatcaccatatcctaaattcctaacatatattatcacaaagcataactcgctacatactaaaacatatatctgcgagcatgaaatttttcaatcagatgatgatttgctgaaccgtcttcagaccaaagccaacagattcagacctgactactaaaacataggacaaaagattcaactaggcaatagatgcttgagtaagatttttcccgatttgagcatattttacaggaaattcttgagcaatgaactaagaacagaccagaagaataatgaattccctgctgaagttttaatcaatataaacaaagaacaaatttgatacttcaaggtcaatgtcaccttatggtacgacatcgtaacatgaactactagaatttaaactattacatcttccgatatctgttattattatgttttttctttcccttctgcgttgctgatattaaattccaagttaattattatctcattttaaaaaccaaaaatctggaatacccagaagaaggttggcatatctctgtgttattgtattagcaattgtcgtttattatacaacaagttgaggaatattatcaaatagaaataatatatggaatttcacaaaccaccctccccggaaaaaaacaagctttagaatgaataaacagtaacagtacacccttaacattgatacatgtaaaagaacccttttccaggaatatggttataaacttgaaagactatcctataaagtacctacaaccaaaagaaaaagaaaagggtcataaccgtcttttcagaactcctcgtccaaaagtgaggaaataaaaagcaccttcaacccttggattactacaaaaaagtccagatcttatagcaactaaaatcctcaaaataatcgagacatggcaatgaaaagggtactataacacacaatactcaatgctccaaatcaaaatatcaagtttaatttgaaagcacacagtgcattccagtaacgaaaaaacatcaacctttccattcaaatcgcataggaccgaaaattcatgaacatggctataaatcatttcacaaacaaggtccaaagaaacagtctttaagaggagaaaatatagaattgaatagatatagaagatgactatgttcaaaaagtgagagataaaaggtagaaagaataaaaagatcaccttgaaatgaaggggcactccagtatttggaccaatgcctttctcaccagtgcatagggctctgaaattctcagcagttttgggaacaacatcatcataaagctccaccactattctcccttcaagctcttcccctatgctaatgtccaagaagcatcttcctctacccatttctctctctttcacactctgttgtgttgtgttgcttaggttgaagtagaagaatgaatgctcacaagaccaccttctagactcttcctctctgaagtcactcttcgaagtttttcaatcggtaacaaacacgcacggcgtgaaaaaaggagaataaataattactggggaaattaatagaagcaaataataataattgaaaaaaaagaagaagaagaaaacaattatcctaggaggaccctcactcactcgttccttgctatggcatttagtttggtttgtgttcacctttctctctttcagtgtcaacaactcaaccctcacgtcactgccagcttcagctttcaaactcctccaaatttaatttaataaataaatttacttcctcttactttcttgtctgtatgctaagggtaaccaggtaaggtgctttgcattgttttctcagctgaccatcttggttgctaaatttggatataggtagggtccattaagtaaagggtaaatttcaacaagaattcttactttttttttgttttcttgagtcatatacaaccgaatcatataactgaatcaatgattatattgttcttagtttaaaataaaattgcacacagaaaaattaaatatatattttttcgttaaatagattcttactggcatgtaaaaatagtggaaccttatattgtatcaatgatatgggttttttctttctttctttgagaatatatatagttttgtaaatatagatcatactatttttttgtcttaatttttcgattcactagagaaaatgaaaataaattatgactaatccaagtaaataaaatttaattaagaattttttttatcaatgatcaaatttagataatatttaaataattttactttaacttcaatatattaatcatttcaactcaagcattgtttcgcataaatcatgatttagtaagaattgatattcattaattttgacaataattgatatttgaaacttttataaatagtgtcaattttattttagctaaaaatgtgcacaaagctaaattttgaatttagtcattgaattaaaaaatatgtccctacgaagtactatgctaatataactatgctaaattaagatacgttgattttgacaataattgatatttgaaacttttataaatagtgtcaaaattttattttagctaaaaacgtgcacaaagctaaattcggaatttagtcattgaattaaaaaaatatgtccctacgaactactatgctaatataaccaggctgtctaatcgcttggttttgtgttccagatcttagactcattatggctatgataaaatacatacacattaatgtcccaaaaagtttgtgtttacacacacctgaacattgttttgcgtgtgtattcatgaaaattattaaaaaatcaaaattttaataacaaaaggtatttaattaatgccttactaatcatatttcccaattgtcaaagaaaaaaaatatgatttaatgcgtgcttttagagtaacgcagttgagttgaactttaccttgattttcgtgatgactttgtcatgaatgtagattcttacagctaatccaaacactattcaaaatttgtcattactttatcaccccaaaaactactgcttactagtagtatgaaatccattttaaagaaatcaagagatcaacatgtgtcccaacaaaatatataataatcgtaacatatttattttgacttgataatgttcattttaaacttcttccattttttttgtctcataagtcattcattatcttggcttgataatgttcatcagaaaaaataataaaatattaagaggaagaaatacaaatatatgcatatatacaagaatgttcatagtttgttgactttgttctcataaaaaaaagtagacatcgccggcctcatatatataatgcgtgcatgcattcttgttgcagcttcatttcagattttttacaaagcttttagtacgtagtagcctatgtagtttctcttatattagttatatatatccgagtaggcatatagcttggtgttagactacactatattattgtatcattaatttgtatgtgaagtatgttaatggtcgacatgcaactcattttggattcttctcatagttaatttgtctccatgttctgggtaattagtttatgatcattgcgaaagaaagaaagtgcaagaattatttggcatcaattccgcacgacatggatagaaacggaaattaacgaacatctgtatttgtatttgtatttgcaatacagcaacaatgctataatgataaatattagcacataaattttctaactattagtaattagtaaaatcagttaatactttggtagattccacttttggtacacattgcatgtgatttacactcttatcgccttagaattaattatattggagatatattattttgataataaaatattttaaaaagaaaatttgtgctttatgataatgatgaaacaatgagttgaaaacgtttttaagaagaaaggtatccacgtctcttgcttttggcatttgatatcaaaattaattaaatagaagaaaaacagatttgactcatttttttaataaaaaatacactttagaagataaaatatgtttacaacaatttttagaaaattaatagttgagattttgtgaagatacaaatttatctgtaagaaattgatctagtgtttctttagtttaggactacaaatatatttcatagagaaaattctatttgagttgaataggattattatatttatggttataccaaaacttatcatttgagtgtttaacataattttatatcattttatctgaatatttaatgtagttgcatatataaaactnnnnnnnnnnnnnnnnnnnnnnnnnnnnnnnnnnnnnnnnnnnnnnnnnnnnnnnnnnnnnnnnnnnnnnnnnnnnnnnnnnnnnnnnnnnnnnnnnnnnnnnnnnnnnnnnnnnnnnnnnnnnnnnnnnnnnnnnnnnnnnnnnnnnnnnnnnnnnnnnnnnnnnnnnnnnnnnnnnnnnnnnnnnnnnnnnnnnnnnnnnnatttaagatattggttaaattagaacaatattcttaaaccaattaattcacaagcttaattatatatgaaattttaaaagtattaaaaatttaatcattatttttaaataataattataaatattttattatctaaaatgcattcttcccacttcagaagttattttaaatgagtcaaatctcaaccattattgtggacggaaattnnnnnnnnnnnnnnnnnnnnnnnnnnnnnnnnnnnnnnnnnnnnnnnnnnnnnnnnnnnnnnnnnnnnnnnnnnnnnnnnnnnnnttgtgtgtgagagtttattatcattactatttttcttgtaaagataaatatattttaattggtatgaaacagtcgtatttaagttgagtatgacaattatgagtgacaagagactcactctaaatatttaatataattgtatattcaaaacttaaatttgatattactaattaagctaaaataagttcacgtcatttgatttgtgcaattcaatgatattaccactttattatgtctattgtcacttttatttattaattatatttttatataatttatttaaattgttaattttattaaaataatattttagataaaacatatttaaatagagtcacattaggcacatgaagatgactatagatactctccaattgttaatttaagtatttatgataagtaatatttgtcaaaaagtttatttattcagttcttaatttgatcattcattttttaaaatataattaagtcattaaaatattaacaaattaattaaattaattcatgaatgattataattaaataactagctagaatttgctttttttagtaataacaatcacaaggacatttggttctttggtaggactccaagatataattattaagttagagactaatctttcttgacttttggtcatatttaaaattcatcatctttcctttccttaagagtgtattttttaagaatcaaacacgcacgaattcttcttacaaatccaacatatattgtcaacttgattatgtttgttggattgtttaacatttctttagctctatgaataatactctcagggtcggtcctgaaaattcttttgcccaggacgaagtggaaaaatgggctcctaccacacattttttttgaaatataaataatattaaaactaagggatggaaaaaacgaatccttaacacacaaaatttttgaaatacaaataatattaaaattaagagatggaaaaaattggcccttaacacacaaattttttgaaatacaaataatattaaaactagggataaaaaaatgagcctctaatacacaaaaaatggatccctaacatacaaattttttgaaatacaaataatattaaaattaacggatgaaaaaaatgggtccctaacacataaattttctgaaatacaaataatattaaaactaagggatgaaaaaaatgggcctctaatacacaaattttttgaaatacaaataatattaaaattaagagatgaaaaaaatgaacccctaacacacaaaatgagtccctaacacacaaaatggacccctaatataggttttatttttattttatttttttaataaaaaattttacttaaactatcggcccaaaaatttttgggccctgggcggaggccctcctggccctgccccatgaccaggcctgaatactccctttatcccaaaataaatagttgttgtaagtagttttacacatatcaagaaaaaaataataaataaataaaagaaagtaataattttataaaatgaatcttacatcatcattaatttattttatagattttgttgttcactattaatattataagggatataagtgaaaaaataattaatattacattaaaaagttaaaataacaattattttgggataaattttttctcttttataataattataatggaagggggagtaagaattctataatcttggtaagtgcacttaaaaactgaaattagtgtaatagttttgaaagatgtgttagtagtatatcagggttttttacttgtaaaaaaaaagtatatcggggttttattaactacttgtcttaagaatattaattgataaattaataaatatattttttattgaaaattatcccacaaatacattataaatagagtaaattataccaatttctcttttattttattttgaacttattaactcttatttcattacaaatgcattattttaacattcctaaaccaacaccaataactaaagtcgttaattttagtgaaagataaaaaaaaatatccttcccacttgatcacaatcttataaaccactccacctagtcctccacctccacggcggcgtgcaaatacgaacctgacaaaaggattgtattaataatattttaatgatttttaacatatttcttaaagataacctaattagcatttgtttattttatttttcaatatattttaacacattctttctattttttagaaatttattaaatatttcaaaattacaaataaaatttgtaaccttaatcaattttgattagtaaaaaagatacatttttttactgcaacaaaagtgtccaaaaagtttttaaggggtaaaaggaaggtttattcgaactaagttttgtttgcaaatttattcaacagaatatgtaaacagagcccataatataattgattgctcaaattccaaagtcaactaggttaaagtggctatcactattatttgccctgataaaggcaccactttcttcaaagtgggaggaaattaacctcttcttaccatttattaagttatggcaccagtgttcattatctttgctctgtctattctatttgcctgcgcctttgtgggccttttggaaaacagataggtcccatgaagcagcaccaatataaatataattgtatggataatattaactcttttttaaaagaaaaaaacttgaccattaaaggttggtttgatgttatataagaaagaaaagattttgtgatagattctcttacaaaatgtaaatatgatttacaattttagtttgaatttcttttaagagatactattgatgcgctaaagagtgtaaatgagtgttatattgtaatttaatcacaaagtgacgtgcataattttttttttacttttatcaaaattatcttaaaatttatatttatcggaatttgttaattaattgataatataattttttttgtcggtaacacataaaaataaatatcaaaaattcgaaagaaaatatttattttaatatgtattcacgatctccaataaaaatttgtaacaatatgatgatatatatatataaaagaacagagtatgaatgtctaccaaatatactataccacgttaggatgattcattacctgttgtttacttttctttatatgaaggaaattaaatcatctattagtggacactgtgccgatggaggatatttctatttctaattcaccgtccaaccaaaatattccattaaaaagaaaggaaagtagaaacaaaaaaccctttttcgaagaagaattgaaaattgaaatgaatgggtggctggattgataccagtacgatccaataaaataattcaattcatattctaatgtaataatctttggatgatcatgcattatcgtgaaaataattctaagaatttaatcaacagaaaattaataaaaaagtaatctattatcataactaaaattatttaacaatcaggtaacacttaagttttttacaatcaaagtttaaatttatagcctgggcaaactatccaaatttaacatttaaattaataataatgaattatttataataagaataaataaaagaatactgtaacaaatatttatatattttttataattacaaatatttatttgtataataatgctttatacatgttcatggatatttattacttcacattaatatatttttttaataattatattattggtatagagtattttttaattttttttgataattaatttttgttgaagaagctcaatgaatcatttttaataaatttttttaatcatattttttttatccacaaaatttaaatttgaaactttatttaaaaaaatggagtttaataacattcagaccaataatttattgattaattcatgttaatatgagatggtcccagtggtattcaaataattatatatttctcaagcaaaattcattgaaaaatattaaaagtatccatatttatatatatcatgctaattagaacgagctttgaaatttttatatgtataattttnataatattcagaccaataatttattgattaatttatgttaatatgagatggtcctagtggtattcaaatagttatatatttctcaagcaaaattcattgaaaaatattgaaagtatccatatttatatatatcatgctaattagaacgagctttgcaatttttatatgtataatttttaatataaacctgatgtaggccatgtttattttatcgatttaaccgaataatctacactaatcaatttggcttttttgtccccggttcacatgtctatccgaattgacctgtacctccaataggatcaattactaattaagatacgagatcaatcaatcttaaaatatagacatagacccttattttgttttggttataaattgatccctaatttttataaattctaaaatagttctttatcataacaaattaattcattcaaaaattgatatttttattttttaaattaattttgaacatttttttgatatattcaagatgtaaaatttgtctcattagattcacctacaactaatatttgaaacaaaaaagtcatatgaaaatataatgaaaaatgagtctagtaagtaataagaaaaaaatgtaacattggatttttaagtttttgattgttcactagcctcacttttcatgcattttcaccttgtttgtgtatttttttgttaaaatattagttgatttcataattttcatgcaaataaatccaataggataaatttcacattttgaatcaataaaaaaaggtttaaaatggtgctcagaaattgaaaacaaatagagtcttgaatgaattaaatttaaaaataaggattattttagaactaaaaaataaattaagagaccatttgaatattttgacctaaaagaatatatctaatttttacaagattaatgactaattggcttggaattaggataggctactgatcaattaactgttgaatgaatatattggctcattaaacataaactattcattcaacctttgaataaataccaagaatatatctaaatttttataagattannnnnnnnnnnnnnnnnnnnnnnnnnnnnnnnnnnnnnnnnnnnnnnnnnnnnnnnnnnnnnnnnnnnnnnnnnnnnnnnnnnnnnnnnnnnnnnnnnnnnnnnnnaacataaactattcattcaacctttgaataaataccaagcccaacaataactataaaaaaatgccaagcccagctaatgcatgttttcatatgtttatacaaaatagtattttttacccgtgttatttatgggttaaatatttatttttatgtaatcaatgcataataagtaaatatatttaaatataatttatatataataaaagttatattaaatattaaaatctatgtaaagtatttatttttatgtgatacaatttattttatataatttagatattaatacgattttatatgaatattttgttcatataaaatgtagatattttatcttcatgatcattaattatttaaatgtaaatttttacttcttataatgcaaatattcatgctaatattaaaattttacctctatgtgatacaaatatttatctcagtgannnnnnnnnnnnnnnnnnnnnnnnnnagatgttaatatgtttttaaaaatgttttatttgagacaaaagctgtgcttctcacatggacatgggatttccagaaacagtgccttttattttagattttagtataactagcattttaatccttggaatgtatgtctaaatatttttatacacaataatttaattatataaattaaaattagtttagtatatatttttaatgaatcaaataatataaaataacaattgatttaatttaaattcaaagaaaacataataattctaaaaataatatttgtaaaactaatattttaaaaacaataaagattaatttttagaacttaaaataaaataagattaatttaaatgtgaaaatagtatacttataataaaatataattatttaaatttttaagaaatgtacaatcttaaaaactaatatcaattggcataagttatatttggagatcagtgtgcaatgaagaaagaaagaaaatatttaaaaaaatgaattaattaagagagtgagagtcgtgaaaaactcactttcttaagtgagtatagaaatttataatataggaataaaataattttgatataattgaatttaagtcgttaaacatgactgagaagcgtggttaaattaattttagttcaatatgttttttttttggtattaaaacgtatattattatttgttaaattgattatatgggatatatccaaagaaaaatgatattgatatactcaattactcattaggtgtataaagtataaacgtaacgtagaaagaggagtaaatttactgggcagatatgtaaatagagttgctgttaatatagcatcagaaagtcacgtggtgtagccgtcctacaaatttgtgtacatgcaaatcaatgttagctttagacatggacaaacaaacacctccatgccactttctttttgctttcggctttttagggcccaaaactaaacggattttgagttgtttgcagtgcccaattcactggttcgttatctcctgccatctatactgtcaataagattttcaaatttttcaattcactatcaaaaatctgaaatgtggtagggaataagcatgtgcagacctgcaaattcaatatatgcaagacagcacactctatgatcctatttataaagtgcttgcttcttgtatctcacatgttttgcctgccccctgcatgtccttttcatagggtggtcgccaaaaagtagaatgaaagacattttttttaaagtgtgttcaatggacattcttacaacgccatttttaagttataaaactaacttacaaactataaatgaccctcccaccctcccacttatgtaacttggtgtgtgaataatatgatagctaatttattattgatctaagataaactttatattatattaaaatgtgagtttaataagtctaatttaactttataaaacctacttgtaaaataaagatattatacttaatttatatactttatcttaataccatttttaactaatccgtgaaacttgaatttttttgcaagagttacagacatcaataggataagaagtggaatgaaagacaatctcattttacaagaccaacacggacaaatgggcaataaagggtttttgaatcgttgcttactaaattcgatcttaggggagtctaaaataaaaaaaaaaaagtgtcacgttttggatcccaaaacaacttccaatgatcttttttaatagactaatcgtggagtttttcacttttctagaattgcttgctttgattgttatactttagagtgactcttatctcctagatggtccaggataatcataaactgtaaacatttgctacaatttattgtctttattatacaaatagcttccatttaagtcttagtagcacctcgaaaaatcctatctagagtcgtagaccaaatatatatagacactgttaagacaagagggggagccattggtcattaccaaggaagacccctttccttgtcttttctgcctctccaaaagtgatctttcataattagcccacacctccctataggagaatccaacaacgatgtatcacaaaagtagcactcttattaattgcattttcattgaaccactgaatagagcaatacaggaatactacttaacagttaacacactcgaaaaatacaagtgcttgtttaacgttgtcgtttctagcatgggaggcccaatgcttgaatttgaattgatgctatcctcgaaagactctttgaataaataactttaaaacaagctgttaaaaatcagatatacataaattggaataataatttatcatttgtctcattcattttttcgttctctgttttctctcatatttttcctcaacatgagattcttatatatataagagcagttcgacaatgtcctaataatacggaataacaacaaactgatttaatcttaattcccatttaaatataataataaaaactgtaacaacctaacaaatacttataataatttgaaatttcaattatacaattcaacactctccctcaagttggtgcatgaatattggtcatgcccaacttgccaattgcttcttcaaacactgtttcaggaatgactttgataagcagtaggttcaagaggtacttcaggatagcccacgtgcttcggttatgtgaggtagaaagaaaattgagatacgggaagggattcagaacaataacatgttcatgtcgataaacttcaaggatgatctatgaagattcagaacaatacaactgacttcacatcaatgaccatcaaatagaatacgtgcaggaagaattgagatacgagaatggattcgaaacaatcacatgttcatgttaatagacttcgggattggtctatgaagaactcaaaacaatgcaacaagcttcacattaatgaccttcaaatggatacgagaaggattcaaaatggaaccaaaatcgcaaaggttatgcgagacaaaaatgaaatttatgataataataatcataatttgtaaaggaatcagagaaggtgaaagttaaggaggagatagatagttggatataagtgaaatacattgaagataagataaaaagatagtaagagatgtacgtttgggaaatgtgaagaagaaaaactctgaaaaaaataagacagcgaaaatattttttttttataaagaataacaagactctgattcatggaagaatcatgactctcattcatggagaaaatcatggcaccatgactctctcattcatgaaagaatcatgattctcattcatagagaaaaccatgacaacatggctctgataccatgttaaaagtcagacatgaaattcttatataataatttaaaatttcaatgatacaattcaacacaaacaaaccacccaacaaattgaaagcatcaactgcctcctttaagaaggagcattcatatagtaattcaaaaaaaagaatcattcatgacaaaggcttttttccaatgtgcattaaatgaaaatgcatctatgatttagaagcaaaaaaaaaaacattcaaagcccaatcaccaatgggtcattcatttaaagcccacgattcaatttcaacccaatggagaaaattggaaaaatgcagattacacgaaagcactgaactggaaaacaagagaatccgagaaactaaacttagatacaataaccaatagacaatgctgatattattctctaatttaaacagatattttacctcgataattgttactttgatttatttattttttattcgtaaagatttatgacattaattcatctgagcgaactagaccccattattgttacttcaccccattgttaattgttactttgatgattattatcgagataaaataacaatttaaattggaaaataacatcatcaatggctacattattgcatctaggtttttctttttgtacattttgaaatgtaatatgaacactaagcactgccacttaactatcactataggaatgtcagtgttgccttcggtgttgctcttcttctcgctgctgttgttcttctttgatctcttgagggggttcctccgctggcgattcctcgccggagttgtgttccggcggtggtggaggacgttgtcgtggcggcggaggagcgattctgccgtcgacgcaggaggagcatttggtttcgacccaggtttcgacgtcaaactcgccgtgacccatgacccgacgaccagaacagagcctaccgatcatgccggcgatgacgccgagaacggtgatgacggcaaggaccgctatgacgggtcccaccgacccgtgacccgaatgggtcgtgtaggcttgtttggtcacttctatgggtggtggctgttgaacaaatggtgtggacatttgagattagggcttttgtttcaatgagaatataaaacacaaattgaactaaaaaagaaaaagaaaattgagtgtctagagaaagttcatgttttagagacacattttgtgggtttgagattagggcttttgtttgaatgagaacaataaaatataacttgaactaaacagagaaagaaaaaaaatgtgcctagaggaaattgatgtttttgaggctcattttgtggggtttagagagaggaaggtgggaatagggatcaccaaaatgattgtgcatttcaacttggcatgttttttggcttgccccaaattatggcaaaagtgtgagcttctttttggaagggtcttttgggggttgtggtgtggtgttgatgataatgttgagtatagaggagattagagaagtgaaggaatttttttgagtgggagagtggggtaacagcaagaaagaaatgagagaggtgggctctttctaggtactgcaacgagtgacttggagagaaagtttttggcagtggaatcgtttgacaaatccatacatcttttaccgacaagggacggcttttaagcaagttctcttacataaaagttcaattgtcataaaagacctttggttaaaaaaaagggttatatatttttagtgtaaaaatttcttaatgcacaataaaataattttagattgttattaaatcaaaagtcacgattatatgatttttaagataattaaaaaataattattataaaattaataaatttattgtatataataatttatcatttcaataatataaaaattatttgtgtttgtactatgagtgtataattttttatttttttattattaatggattattctaatttttaaaagttaggtcaaatatataatctagttccaatatatttaacaaactctcaagttattccttacttattaatttattaacttggtctttataatgtaaatagtactgatttggccaacaaaaaaattaacagtcagtaagaatcagattttttatttgcgtactttaagtttgagacatgctttgatcttttggagaacatcccaaccttaactcacctaaattgtatgtgattataattttttataaatattgctcattatttctaatgagattattttgtattaatatcattatctgaaaagtaaaatttttatatctacaaaataaatattgactcattcgaagtctggtttgacaaagtccagagatgctattatattttaggttgtttttgataagaaggaaagaaataatatatgaaaaaaaattgtattttatttcatttgatacacagtttttataatctactttaattcaacttttttcttctctccctttctctcttctagcatgggggttcatatatgaatatgatacatgatgtcattgatgtcaatgtgtccttccctttgtagatgtgaccatatggtttatgatgattaacaagctgagtccaaaaaacatcaaatcattaaagctattacaagttcaccggaatatctgtagtgaaaaggatacgtctctgtctgtttctaaaattaaaataaaaatattcattcagttttaaatgaaaactatgcattttagattaaataaatgttttaattatatttaatattttaaaattaattttatgaaattttagattaggtactaaaaggttagggaaggtgagagagattttttaaaacttagttacgtaatcatattattgtttttaattaatttgaataatataatcaaaatatggtacgcgtttataaaaaaaataatataaatcttaccttaacattttaaaacttttctaagtaaaganacatcatacttttatttggtacatacttatgcgtctgtttaattatctgttaaaataatttgaatatttaatcaacattttatatgtgattaatttcaaatatcaaatcatttatttaatttcctaagtaaatttatcaataattaatttaaaattaaataattgaacttttttcttaccaaatatctctttgcatgtctcatttacactgcattgccaaaactcaattttaatatttgaaaaaaaataacctccttatttctcatacgttataattctcttatctttgagttcccttttcttcgattcacaaagacaaaatgtaagattgatgctaataattcatcacaaaagaaggtagattaaacagagttttttacccctnnnnnnnnnnnnnnnnnnnnnnnnnnnnnnnnnnnnnnnnnnnnnnnnnnnnnnnnnnnnnnnnnnnnnnnnnnnnnnnnnnnnnnnnnnnnnnnnnnnnnnnnnnnnnnnnnnnnnnnnnnnnnnnnnnnnnnnnnnnnnnnnnnnnnnnnnnnnnnnnnnnnnnnnnnnnnnnnnnnnnnnnnnnnnnnnnnnnnnnnnnnnnnnnnnnnnnnnnnnnnnnnnnnnnnnnnnnnnnnnnnnnnnnnnnnnnnnnnnnnnnnnnnnnnnnnnnnnnnnnnnnnnnnnnnnnnnnnnnnnnnnnnnnnnnnnnnnnnnnnnnnnnnnnnnnnnnnnnnnnnnnnnnnnnnnnnnnnnnnnnnnnnnnnnnnnnnnnnnnnnnnnnnnnnnnnnnnnnnnnnnnnnnnnnnnnnnnnnnnnnnnnnnnnnnnnnnnnnnnnnnnnnnnnnnnnnnnnnnnnnnnnnnnnnnnnnnnnnnnnnnnnnnnnnnnnnnnnnnnnnnnnnnnnnnnnnnnnnnnnnacattattatccaattgataaaatatcataaacataaacaaaataatgcagaaaaaaaccacctccataaattttttaaaggaattaaccgattcctataactattttttaaaatatataaatcataaaattcaaatataaaaggaaataaaaattcttaaaaaaagaaatatttaaaataaataaatatataattgaaaaaaatagtccattaagagagaaatcagttattggaaaaccaatgtaaaaaaagaaaaaagtgaaggtgaaaaatcgatttggagaaaatcattttttgtcatgaacaataatttgtatcacttgggtaaataatcttcaacttatattatttatgtaattttttaattttttttgtatttatgggtaaaaaagtcagattaaagaagtgtaattaaaataaccggacttataagttataaaagaacttttgagagaattattttagaggaaaaagtgaaagggtgatggatggattcctaattcctccttaaccattcaaagcttaaaatttttattccttaaatttgtacatcagtaaagaaatgatacgatctttcctgcaggttaaattcttgatagaataacatatctattttattttatttcatttcatttattgtgtttcattccatgtcgttgtaaggtattactaattttttaaactcccagtcccagaatacgtaccctaatttttaacatgggcaacttcaacattatatcattcgtggatggaagatgtacaaatgctgacagggtgagtggctctaagaaaagttggatgaaaccaataatcacgacaaaatttgcagtacttgcgtaatttgaaacaactgtgttgtaaggaaacagaataattaatacattttggagcttttggtgattaaattaaccctacacaaaaaagagttgcttccgacttctgtattttaatcggtgacacaacttctgaattaatgataaaagactggtatgtttaacgtgacagttttgtgaaacaatcataccctgggctcttgttaaccaaaaatgctacggcatattaattaaccaattaataaatagtaaaaagtttctattgataaagactagtatattatattcattatccataacattaatagtttcaaaccggatgtattaaatactttttaatttcttaattagtaaccaaaggcactgatttggccggtgctgcttagtgcttgctacctaaattggtaagataaaggttcagtttatttaaactcatttgtttaaataaatgtttatttctctgttctttcagtatgttttttaacctgtattagtttttaaaaataattttttatttattttaagaagtaaattctaactactacttaaaaaaaacacttatataaaaaactcttcatttaaaattatttttttaagtttaaataacctatttattttttgttaaacttttgcctcaaaggtcaaaatgttgctcatacttgtttttgtttttttcgaaaagaaacttaaatatttcgatatacaaaccaacacaattattaggccttctctttttttttgttggggctccggaattgaaattgttgatccacgtttgtcttcttttccctccattcctcccacaacaagcatgcattattgaggatttgaggtcaattatttcatgctacatgcaaattaatgagatgtttaaccaaattgaactttaaaaaaaaaaaaaagaacatgatatcagagggaattgcttcacatctatcaattatatttacagcataacccagaatttgaattttgcagctaaacatgggtataaagttattgtagaaagcagaacaatcactagctgtgacatacttagtaatatattcggaacaagaaagagaacttgctcattgaaatatttaaaccctttagtactaaaaattcttaaagctggaggtatcactctcttacccatgcagaaatgaaatagaatattgacagggcagagaatctagctagtgttttcagaaagcgtggtgattatgattaggacagaaatatcaattaaatttatgggtagatgacagagttctcaatttgtctctaccaaaaggtctcgtcgggcattatcaatttatcagttcttcagtgtatattcttttttttttactccaaagtaggctaattatttaaaataatacaaattaaatcaataattagcaaaatggtgcagaaccaaaattatttaggaaaaaggggcagccaaacacgcccagctggggcgtgtttaaggccatggcgccacgtggcagggttaaatgggggattagggtttttgcgatttttcgtaaaattacggaaggtcataacttttgaccgggacgtccgattgacgcgaaactggtggccacgcgctcgaaatcgagaggagaagccgctggcaagttcccgaaggggacttgcccaaaaaattttcccaaacgaggcctctaagtgcctcaaatttgcgatttagtcttcggagccctaaaaaaattcctgttctctggtattttgtctatccaatcagtgaattgcaatccattctttgtttatctaattacttctcttaatttcgagcgttttgacataaannnnnnnnnnnnnnnnnnnnnnnnnnnnnnnnnnnnnnnnnnnnnnnnnnnnnnnnnnnnnnnnnnnnnnnnnnnnnnnnnnnnnnnnnnnnnnnnnnnnnnnnnnnnnnnnnnnnnnnnnnnnnnnnnnnnnnnnnnnnnnnnnnnnnnnnnnnnnnnnnnnnnnnnnnnnnnnnnnnnnnnnnnnnnnnnnnnnnnnnnnnnnnnnnnnnnnnnnnnnnnnnnnnnnnnnnnnnnnnnnnnnnnnnnnnnnnnnnnnnnnnnnnnnnnnnnnnnnnnnnnnnnnnnnnnnnnnnnnnnnnnnnnnnnnnnnnnnnnnnnnnnnnnnnnnnnnnnnnnnnnnnnnnnnnnnnnnnnnnnnnnnnnnnnnnnnnnnnnnnnnnnnnnnnnnnnnnnnnnnnnnnnnnnnnnnnnnnnnnnnnnnnnnnnnnnnnnnnnnnnnnnnnnnnnnnnnnnnnnnnnnnnnnnnnnnnnnnnnnnnnnnnnnnnnnnnnnnnnnnnnnnnnnnnnnnnnnnnnnnnnnnnnnnnnnnnnnnnnnnnnnnnnnnnnnnnnnnnnnnnnnnnnnnnnnnnnnnnnnnnnnnnnnnnnnnnnnnnnnnnnnnnnnnnnnnnnnnnnnnnnnnnnnnnnnnnnnnnnnnnnnnnnnnnnnnnnnnnnnnnnnnnnnnnnnnnnnnnnnnnnnnnnnnnnnnnnnnnnnnnnnnnnnnnnnnnnnnnnnnnnnnnnnnnnnnnnnnnnnnnnnnnnnnnnnnnnnnnnnnnnnnnnnnnnnnnnnnnnnnnnnnnnnnnnnnnnnnnnnnnnnnnnnnnnnnnnnnnnnnnnnnnnnnnnnnnnnnnnnnnnnnnnnnnnnnnnnnnnnnnnnnnnnnnnnnnnnnnnnnnnnnnnnnnnnnnnnnnnnnnnnnnnnnnnnnnnnnnnnnnnnnnnnnnnnnnnnnnnnnnnnnnnnnnnnnnnnnnnnnnnnnnnnnnnnnnnnnnnnnnnnnnnnnnnnnnnnnnnnnnnnnnnnnnnnnnnnnnnnnnnnnnnnnnnnnnnnnnnnnnnnnnnnnnnnnnnnnnnnnnnnnnnnnnnnnnnnnnnnnnnnnnnnnnnnnnnnnnnnnnnnnnnnnnnnnnnnnnnnnnnnnnnnnnnnnnnnnnnnnnnnnnnnnnnnnnnnnnnnnnnnnnnnnnnnnnnnnnnnnnnnnnnnnnnnnnnnnnnnnnnnnnnnnnnnnnnnnnnnnnnnnnnnnnnnnnnnnnnnnnnnnnnnnnnnnnnnnnnnnnnnnnnnnnnnnnnnnnnnnnnnnnnnnnnnnnnnnnnnnnnnnnnnnnnnnnnnnnnnnnnnnnnnnnnnnnnnnnnnnnnnnnnnnnnnnnnnnnnnnnnnnnnnnnnnnnnnnnnnnnnnnnnnnnnnnnnnnnnnnnnnnnnnnnnnnnnnnnnnnnnnnnnnnnnnnnnnnnnnnnnnnnnnnnnnnnnnnnnnnnnnnnnnnnnnnnnnnnnnnnnnnnnnnnnnnnnnnnnnnnnnnnnnnnnnnnnnnnnnnnnnnnnnnnnnnnnnnnnnnnnnnnnnnnnnnnnnnnnnnnnnnnnnnnnnnnnnnnnnnnnnnnnnnnnnnnnnnnnnnnnnnnnnnnnnnnnnnnnnnnnnnnnnnnnnnnnnnnnnnnnnnnnnnnnnnnnnnnnnnnnnnnnnnnnnnnnnnnnnnnnnnnnnnnnnnnnnnnnnnnnnnnnnnnnnnnnnnnnnnnnnnnnnnnnnnnnnnnnnnnnnnnnnnnnnnnnnnnnnataccctaaatcgtaatttctcgtagcaatatccgatgaagacgtattttatgtcaaaacgctcgaaattaagagaagtaattagataaacaaagaatggattgcaattcactgattggatagacaaaataccagagaacaggaatttttttagggctccgaagactaaatcgcaaatttgaggcacttagaggcctcgtttgggaaaattttttgggcaagtccccttcgggaacttgccagcggcttctcctctcgatttcgagcgcgtggccaccagtttcgcgtcaatcggacgtcccggtcaaaagttatgaccttccgtaattttacgaaaaatcgcaaaaaccctaatcccccatttaaccctgccacgtggcgccatggccttaaacacgccccagctgggcgtgtttaaacacgccccagctgggcgtgtttggctgcccctttttcctaaataattttggttctgcaccattttgctaattattgatttaatttgtattattttaaataattagccctccaaagtaccctttgtcggtttctcatttgaattgcttgtgagctaatcttctttttatgataaggtacaattcacattatctctcaattagaattagaggcaaaggaattgcatatagttggggcaggaaacgttatatattcagataatgtcattgatgcttctaaagtttatgtttccaattacactcaaatctcaatgttctccctttttgacattacttggatctctcttgatctatataatttagaaagaaatcagggaaaaattgttttaacggaaaggataaatggtcttacccagttttataaattgtgaaattaaagtctatgtaagaacaaaaaatggaacgataaattcccttgaatatcatggaggtatgagtgtaattcttctagcaaaccgaccaaattttaagaagggattttatcagagtcaaataaaggttgcaccttaagtctaattaattcatgaatgaatggtatctgtactgcattagcaaaaaaaagtatatgtaccgcactttaattcaactataaattgttatatatacattaaatttattgatttttataataaatattttaaaatttatataccaaaatttatgatgtgataatttaaatgattgctaatgattttgcaatcacaatgtatgcgtacctattaaacttttaatatgtttatgatacttatgttgcagtggatataaaatctatttattggatgagtcatgaaattttgataaagataaaagttaatcatttcagtttaacttaattgatttagcaatatgtataaataattgtaaactctttgatatttgagataaaagaaatagtgaatagaaggccaattatatacctcaaagttttcaatattttagaaagagaaaaaggatatgtgttaacagtttaaatttttttatatagttattcaatcataatctatctattatatatatgataaatttattgatttttaaaatgattatctttaaataattcaaataatgacatataattgaattataatataaaattattttatattattagtgtataaatactaaactcttaaaaaattaagctgagatgcttgatacaaatctaccccaattcacactcactttgtattgggcatgtgtgaaaatttcaacatgaaataaaaactcaaatgacgaatcaacaaaccccaaaaaaaaaagatgaaaaaaaactgggtcagtgagagttgagaccgaaaagcacaagttcaatggtgaaaaaacgagtaagtcttgaatgagcttctcgaaagtttgatgtaaataaacaaatttttgtcctccgtttccaagctatatatcctcgtttaattctggtcattgaataattgagactttgatgaataactttttcctattaatttgtgtattgaattaaaaattgagaagaatcgtgggtatcatataaaaatactaaaaaactttcaagatggaagttatcctatagatgtcatattcatgtttgttcaaaatgtaaatcatagtattcattcttatgtgaatggaaatgcatttttcccttagaaattggaataacttttttcgtaaaatctcgtctgcttactacgtttctattccaatctattccaatacaaaacaaaaactaatatatatatatataataagtatctttgtattgcagaattgtattccaaatggaaaaatccttcccttttttgaccggttgtgggcgaggagggattcgaacccccgacatcgtggttcgtagccacgtgctctaatcctctgagctacaggccccaccccatcactaaaaaatggaaacatttcctctccctagcctaagaagatgtgaaagagcctctctataagaacggtccgtttcgaggtgtgaagtgggagataggagatttcataattggttggggttttgaataagacgaccttttcatttttcattcttattactttttcaatattgaaaaagtaataagaatgagaggtgttaagcttattatcatggcgccgagctattttttataaattgttgaattttttttgctttcgttcaattcatctatcttttttaatttaaatttaacaaatagaaatttgaaaaattgttttattttcgttaggcctagaatacttttgaaaatacttttaagaatactttcaataatacttttgctaatcctttttactttttactttttctattaagatagttagaaacaatttcaatttttcacttactcatatgagaatttcttgtttaaaaataaaatattcatttgtacatttatcataaaaaaaattctctgtgtttcacatatatatgtcaaaatttgtgacttgtaattatgataagaaatttttgaaaaaaaaaaaagaaatattccaatttagttgtgaaagaataaactgtgaataaagcacataaataacgacttaaaaatagagagggtatgaaaaactcatatatttatggatataaatccgggttatttcaagtaaaaaaaacaagtaatttcttgtaattacaacacgtatacaaaagaattatttgatatcatagataatctctttatcaagaattatatatgtgattctagatatgaaaaaaaatctggatacaaaatattttgatgggatgagagtcaatagatttctatatatttatacttagtatataataattctagtgattatagttaagccaatatatatcataatatatccttttttaaagaatttttggttatatcttatcatttttagtcattcaattttaaaataatgtatttcatttatattggtcaaatctaatattcaaaatttattattattattttactatattctattcattaggtaaatataattttttgttctttgataagtcattatacaaattataaacttgttccgagactgactttagtacaagttcatgaagaagtagaagcaacccagacaataaaaagaagaacatgtgacctactaatgatgtatgcaacacacaattgaacaaatccagactcgaggtggagtatgtaaaaatataaaatctcatattggacaaataaagacaagcaaaagtgcgcataaagcatagaggggttgaatctgatattctgaattctgattggttcgaatcttttagataaatcacctctcatgcttgatatggattcaactttttattttattttattgattgttagttttttttaatggatatcaaatttatgattttttttttgtttccgtctcctttaatcacacaattcatcttatatctcatcactcattttgtgcaaaaaatccaacgctggtattcaattgtatgcatgtttatactttgtaagatatgtgtggatgagagcacggaatgatcagcagaattgcaatgttatttcacttttacaaaagagttctttgattaaacatagacaaaatgaataatttggtttacatagcctaacaacacctacgtcttacagagcaagaaccaagaaaaattaccaagaaaaattagcatataaaaagcaagtaacctatgtaatgtatacaaactttaattatatgagaatattatgcactaacatatattattattcaatcacaaattataactttattaacttttataataattatcttaaaagtcatatcaatgataaattgtaattgaatgagagtaaaactgtttatcattgtgtaaaaaaactgggttattatcggcatacaactttttttttttcactccattttttctttcctactgtaaaatccccaaataattaaatatatatatatatatatatatatatatatatatttatgatctaaattataataataaaatataaattttattaagacaaggacaaattttagcatttagtcttcatgggagtccaaaattattagaaaaatcctcttcgatatccatgtggcattaggagaatacacaattaaaaacttagcctccgacagcaatacacgtaccagcatgcattaataagaaaaataattgtaatgattagatagataaaaatctctcaaaacttagttacataataactaaactaaatcttacccgattataatttagttgattcctttaaaatccaaccaaataaaccattataaatacccttgtacccagaaaacacttacacccaaaaacactaacaactccctctcttcataaacctcccctaccattttctctcatgtaaaagtttcctatcttagactattccagacaatccctactcaatccaccaaaattttcaaaggtaggctaggcttcaatctctatcttagaaattaactaagtttaatttattctatttaacctttatattagttaataatctaagttttataataaggatacggtgatatttttagcaagattacacaggaatttataaattgttaaggatttggaatatacgtaaataattttatggtttatagacaatttagaattaactattagaattaaaatagcatggatgaatggtacgtaattagtaaattgagatttaaatattaggatgaaatatgagtgttaataatgtaaaagacccacacatttgcacgaccaaattaaagtttacgtatctttttcaaccacctcggcttttctgataagttgtcggtccagcactcatattcttcataaactaataagggatgctacataaaccaaatacacccataggcttatacgcatacacacctcgacctaatttcattaccggaattatactccttctctatatagaacccgactacacaggcattgaactcggccacccatgcaccgaactcggcaacccgggcactgaactcggccacccatgtactgaacccgccacataggcactgaactcggccacccatgcactgaacccggccacacaaacactgaactcggccacctatgcactgaactcggccacacagacactgaactcggccacccatgcactgaacccagccacccatgcactgaacccgaccacacagacactgaactcggccacccatgcactgaacccggccacccatgcactgaaacccggccactcatgcacaataaatccgacctgcactcttctcggcatcacccccgacttgcacccttctcggtatttgcaagttcagccccgtatacaactcggcaagtaatggttctcggcattacaagctcagccacaaaacaccggcactcatggcacattagcaccatccatgcaagccccagatttatgttcggctttctgtatgtgccatgatcacctcagccagacgtgtaaccttggtcttcctggaattcggccaaccaggcaacccggccatacccatcaaaatatacctcttggcctcatcactgccggcctctatgctcttttgataccactaaaattaccccgacaattatatatatatatatatatatatatatagcggttccatccaagtacaatacatttcggcttttaaatatattaggtatagtatatttaggtcatgcaggttcacgtgaagttttcatcaattccgaagcatgcagaccctttggaattatatatatataaataaaagtatttccgctaatactactgttggatatttttagccaatatattaactaaactatataaactacccaattgaaattcaacatactcttattaaatataattctatgataactaaattattctaactattgtaccaacccggtcttggctacatattatatatatatatatatatatatatatgtcgaactttagcataacattagcatctcataaatattaaatttattctgttggtacactataacgtggacaaggtattatctatcttattttatgaaagagaaatatctatcttatattatgaatttgtaatatgattaatatttatccgagtttcaaattttgagaccggacctatgattttatgagattgacccaaattttaaatggtggacatcgggcctatgatatcacaagagatcaggtgctaatacatggaaattcatgcatgattagtgtaagacggccgcggtattcctacatagtgtacatatgtagaggccatgcgtacctatgaccattgcatttcattccatgcattcatacatatatatattgatttatttactaatctgttaaagtgtttgatgaattagccttgctttatttactaacctgctaacatgtttggtggtttagatttgcctactaagaaatttatttttcactagatttatttaatattttattttagatggcttcaatcataatatttcttgatgccctgaacattgcatggtatgtggatgaagtcagaaattgttatgtagtgactatgcagcctgttcttcgtgctcatatttactttggcgctcattttccaatctctgtgtttagtgaagattttaatccagtcgatcctttctttcaatttgtccctatgtatccgaatccgatcacagaccccataatcctactcagtgaagaggatagtaccggagattatgtttaaatgagaagttgtgaactttgtaaataaataaaaatgtttgaagcactataatgttggaatataaaatagagctagtatgaatatgatgatgtaaaatagaaggggcatgtaatatgatatatgtatatatctaattccttttgtttttaatttcctttgtttctacctcaatttctatttttaattgaaagacaaaagaataaaataaaaataaaataaaataaataatcaaataattaagtaattaaataaataaaattatttaggatattacacctaccgcattttattatcacgtttcattttttctttttctcctgtatgtccagtcacacaaatatttccaccacaataaacttctaaacgtgttagaagttagaaataaatctaggggctctgcccctccccagtataaaaattaaaaaaaaaaaaaacttaagtagtctgatctgtttatggaatgagcagtacgctgtaacccatttcaaatctaaaagtgtgcatgtgtatgtggtccgttcttattaatagagttaataaggaaaaataaggaagtttctagatttaatgtgttgtgtctacctaatgttcatcaaacaaatatagatataggaactgggaaggtagcaagtggccaaagtgcccaagtagtgggaataaaattttgtggataaggaccaattataacacattcaagtatttattcaactaatatatttcaagtctcaatcaattaacaacatgcttctatcattaaaattataatttctatttatgaaaattcctccaacaactactaattagtgtggtatagtatgatttagagtctcacagaaaagacatataaagccaaacaccgtatccgacaatcctattcaaattgaggtatgatctatcatagaaattgaggtcaagctggtaatttctactatagaagtaattatataagtgaattgaacaccacactttaatccaaaatcttaaagttcagatttataagtcttctcctcacttatgatgtttaacttgtttatttctattcgatatgagactttaactcacatttatactccaagacgagggatacatataaacataagattttagctaatcagcatgaatactcacattttagctgtattttcttattttcatgagattttagaacctcatatattctgtatgtgatgacaaatgacatgatagcaaattgcaaaacaatacggaagtaataaaatttaagagatcgttcttcatcaccaaaaataacagaagagaccgttcttcatcttctcaatttgggtgattaatatatagaaatttagaatcatgtttgcttagaagactaactgaagataacgagtaagattgaaaatagtccaagttatccaacacagatagatctattgcctaacctatgttagagctaagtatttgtcaatgttaaaacatagacaccctagcactatgataattatgcactcaaaagtcacacacaaacccttccataatagatttatcgtctgtttggtacaaatgaaatagagggaaagaaggaggaagagaatgttgattgtttgatagggtgaaagtggaatgaaatattaaaaaaaaataggtggaggccgcaggaaaaaatttcctgcaaagacaaacaatgattatttgctcaaaaataacttagaaggacaagccttccgaatagaatgttctgaacttcccttggcatctttcttagcaaacaaatctacacacgagtttgcttttctataaatatgacgaagagagacaagccaatccataggaagaagtaatatagttgtcacatctatatttattgcaccgttaaaacttacaagaattgcatttgttagatagtaccattgattaatgttttgtagttgctcacatatcacaacagttacaacagacagttacctatttggatctgtgattaaacccttggtgatggctaataagaaattgatcttgaaggaacgcattcaagatcatatacataactcgttcataaaataggcagttaagcatattaatctaatacaaacttacaattgtttagtagtgtacaaacaaacaattagcaaagcatatataaaattataaatagtaatgtcataaaggtttcatatttcagcaaaatgatcttgacataaaagttaacatggctaatctgaatattcttctgggataccgccaacacctacaataatgatggacttgacataataatcagaaggatagcatttatgctccaagtgacttacattggcttcctcaattacattgttgaggttttgctaagaagttgaaaatacaagcacttaatagtttacagagccacatgtccttctaatttgcccttgtattcctgtaagtactccaacattactaagcttcaccatggatgcagcaaaatcattatagaaggaatattggtcggtgctgtaaaaataagccatagaagaagtccttcgatccgctagtagtgccatgtcagattctagaaaccctttgttgcatacgagatttctataatactcactgtcgaaggtcaaagtagtattagaatcaagaggtgcaatgtagctgtttgaagtgtctccatttggacacgtgcttcgcaattttgagagaagtgaataggcaagcacaggatcaggtctgccagagccttgaaaataaaaatgtctccttttgaaggtcaagcatcgggcataaccaattgtatgtgcccctgatcatggaaatagacacatcaagtcactgatatcaattatcaaacactcatcagtcatcaacataataggttgtgtatgcaaataatctccaaactatataaagcaaattatattatgactctccacggtctatactttctagaaaaattacagcaatacctcctaatgttttgtgtaattacacaagaattttctattttttaaccattactttcagctctcttgtagagagtgttaatgtaaggtttgaggtggtgttaatgtaatatttttaaacatataaaggggtgttagtgtagaaaaatgaaaaagaatagagttgtatggaattacacaaaatcttaggagataaagttgtgctctactttataagattgacctgaaactcctttaaaatttttatttaatgaatcacatagatttgaagacgagtcctgacatcatgataaagttgtgttttggtgacttgttagtcatgaattcaaatttaaaaatagtctctttatatatgtaaaagtaagacgacatacactatctctttcccttatcttcgcataacgaggaatctttgaacaatagattttttaatcacatataaatttcatacattattgtatcaaattgaatttaactatgcatgatgttatgtattaaaaaagcttcaaatatttggtgaaagtccaagttagcttctaccatttccaagaagtaaaatcttgttactaaaagatgagaaaagagtaagaccctgaaagggctacaacatccctcaagttaagaccctttgaagtaaactttgcaatgatgttatctagaggctcgaacggtgaaggaatttgttgattagcttccatccgattggctgttgttgcatctcttcggcctaatgcaacaggccaagaagggcctccaacctaagcaaaaaggttggttgcatcaaaaaggttgtttaattatatatatggaactttcatctgagaatttctatcaattaatataaagtaagtgacacttttatcagatcaatagcttccctaactgctaaggataagatatcagcgcaggaaactgttgatggaaattgcctttcaacttgttcttttatattatcaatcacttccatcccccgaagtgaattgcgattaggagaagcattcttttcgcccgtgaaatatggtgtatcatcaagaagcacaaaagcatcacaaccctttcacaagcaattgaacataattaatgacgttcccgtgtaacttatcattattataatggcatggcaccaagtacaataattattgcatgatttaaaactatcataatcgcaactactctctatattacatgtaatggaatctattaattatgtctctttttttaataaaaaaaaactaaattatgtgacgtatagatattgattagaatcatagacacatggtctcataaatctaataatttctcataaagaaaaaaaggctctccaatcaacttgcatttttactatttaggatatattttattaattatctcatttaataaaaaactagattatgtgacatttgtactataactaatagtatgcttagattagaggacacaaaacacgtaattaaccatgtgttttttttaattgaagaaaaataaaagaaaattgacttttagaaataaaatatactcccatactttttcatttttttctttaattcatttttaaattttttcatatctcccggccatcttttactttcctctaaatcaaatataaaaataaaattaaataggatgaaatacgtttttaatatttgcatttccagtaaaatttggttttagtctttgtacttttaaataaactattttggtctttaaacttagaaaaatatgtagatttagtaccccttaatacaaatggccggtttaatgaaataaattcacatgtttttcaatgtttgaagagtactaaaatgatcgatttgaagtgcatgaactaaaatcaaattttactaaaaatacatgataaaaaataaatcaagttttatgccctatagcatagtcacactcttgaagcagcttctagccgtaaaaggaaaaacaacaattggttttcaagtgttatgctgtaaaaggtatggtcacacacagacacttgaaatcttatctgttattggaatgagaagctgtaacacatttcaaaaggagagatttattttttgtctcactcaccattaagctgacctggacctattatattcaactaaaataaatttctagtgccaattcatttaaccgcatgcttctaccatcaaaattaaaacgtctagtaaagcaagtgagcaacacatactattactaattagtgtgatgcggtatgatttcgactctggcagaaagaacatataaagccatgctaaaaggtacgttcctttttaagtgtaagaaataacaaaaccctaattgaaagcacaaaagaatttacatttactatgcaatcgtgaaagtgcaaccgaaggagggacgcgggcattgtgttgtcatttttaatggctgaccaaacaccatatctaacaatcgtggtcaaattgaggcatgatccatcatagaaattggtatcaagctggttattactatgaacgaaaggaacgaagaaagtaaaaagcaaacataagaagaaagtgaagtagatgatgaaaagtctacaaatcatgacttgagaatgtctatactatgtaagaaggacttcacaacttcaaattcttatgacatgttgtgagctacacgtaagggttatttatatgctcataaaaaaaacattaatggatacaagatattttttttctgtattattatttaacttacgagacagatttaccgaattagagatgcaatctgtttcaatgtaccaaatttttggattgacgtcaaacccatacgccataggatatcaataaattatttatgtgccagtgcacgatgcaatgtctgagttcattggtgaaacgaagaagtggcagtaacaatgtaccattattgctattactaaaactataatggtatgttaaaaagtagataatgataaattgaaataataattcttctttcattcattcattcactccattttcttctattttccattctcttttatattttctctcaacataatgttcctatacacgagattcttatataagagagagaaattcaacaaaatgctaataatacgggataataacaaactgaacaaattataacaacataataaattctaataataatttgaaatttaaagtatacaattcatcatggtcacacggtacccgaaattctttcagactatataagtatcttttccgaaaaataatcatgtttcagtttgatgtatatattatgagctgcaaagctttttctctaagctttctttcagaatatttgatgttgcaggatttatgttcacaactcgaactctattgataggatcaccataagcattagttttttaaccttgattattacgcattatttttttctctgtttatctttgtgctggttgaaaaagaccacttttatattctctttctatgtttgtgagtttatatttgatctttaatattttatattttaacttttacattttatatttttagtttaattgcatattttactgctgaattcaatttataatgggttggattactcatagtcatagaacctcaaatttaatatatgtgatgacaataagctaatagcaaatttaataggtgtagtttagtttaccatacacattaaatttgatctccataaaatacatttttggaggaagataatttttttaaaaatataattaagttacatgttgaaaattaatcttatagtcaatgaaaattaatcctatagtcaatttgaaggatcaaagtttataaaaatatctcgggaaaagtcaatttaagaaactattgtcattttctttagacgatcattagaaatttagaactatgcttatttagaaaactaattgaggatttaaagatgtttatgcacaaccaatattaaaaaggatccagagaaagaaaaagaaattttagaattgataataaacatcaatgataataaataatagaaagagatcataattnnnnnnnnnnnnnnnnnnnnnnnnnnnnnnnnnnnnnnnnnnnnnnnnnnnnnnnnnnnnnnnnnnnnnnnnnnnnnnnnnnnnnnnnnnnnnnnnnnnnnnnnnnnnnnnnnnnnnnnnnnnnnnnnnnnnnnnnnnnnnnnnnnnnnnnnnnnnnnnnnnnnnnnnnnnnnnnnnaaatattttgattgatatagaagaccttaaagttataattaatttaaaactcattaacttttaattagtgtggcagtaaaaaaattggaatacatgcaatcatttaattatggattgcgatatatttgaaaaatgttaaatattataatagtttgatcacagtgaatttttttacgttaataaatttactaaacttaaattgataaaataaatagtagatagcaatcatcccaaaaagatagtagatgctacatattgacacgatattttcctcacaaacaaacaaaagaacaaatttgttgcatagtttccatcttctttaaccaagatatccagccagtgatagatttgggaacctaactcaataagagtaatttatttaagagataataataataataataataataataataataataataataataataataataataataataataataatacatgtagagaaggttaagatcataaaataaatatgagaattaaaaaattatagtcaatggattcaaaaatttgaaaataaaaaattattatatttatttgtaatcagtaaagtgaggagctacatttgcacatcctcactggaatataggtctgctcctgtatcccctgtgagtcaaagacgactaagatccatttaatgaaacagatggtagttgaaggtaacgtgattggtatattcatcacccacataggctctactcctccgtcctcatcttgttttggtataccaccatataggtctctataccttgttgtactatcgtataggtctctcccgttttaatggttaatttaattttctttgatgttcttttttttctgaaagaccaggttatcactaatgttgtatttggtagaggaaatagagaaaaaataatctggatctcataatttttatattttatttttaatagaaggcgagtcctaatacaacagtaaagttgtgctttgatgacttgttggtcatgagtttgaatctagaaatagattaaacaataaataaagataacaaggtagagcacatgcaagagacaagaaaacaaatgcttggaggtgtgaattatcgtttggtgtaatgttagagatttttcagcatttaacgttatttcgactattgcctttattagctaaattatcctaatcatgatttatcatgtgaaagagcctacattacataatttcactcgtaatctcttaagagctacaccaaataatnatatatatatatatatatatatatatatatatatatatatatatatatatatatatatatatatgtatgtatgtataaataaggctaaataacatcattctatccttagacatggattatctagaagttccttcaagttcttaggatgcaaacatttttcaatgattaaaaccctataatatacatatgaatagatgatcaaaccataaataagacaataaactcagaaaggaaacaataatattgaaatagtattaaatggatagtatagatcattacatcaagagtgtttggttgtcaagccccaacaatgggtaatttagtctctcatggtcatgagagactcaaaaaaacaagatgaaacaaaggaaatgaaagaaaaatggaaaaagaaaagctccaagtgagtggttttttttttttctattagtgccttattgtttgcctcctaatagcacaatgctccctctttttattcttcaaaatgaaacacggtcatatttttcgaaaatgattgtgcgctaagcttgcatgtgttcactgagcgcacatgcaaagttcaactggcttaaattaccatgtgttaagcctccaattgtgtgcttagcgagtatgcatgatacagttggcctcaaatttggcttctcgcgctgaatgtgcattgcgtgctactttaattcttcaacatcttttagacctcctattgtgtcaaattctacaaaaaaaaaaaaaaatagaaccaaacactctaaattcactaactttaattttctgtataaaaattcagaagaagctactatctttttagatcaaaagaagcattaaaagataagaaattagataattgttatatgatttaaatatacaaattaagtatgtatagcaattatcagtttccattttcattctctctaccaaataaagcatgaaattatggaaattgcttttttgcaagacaaatgcatttatacagtagaacaccttacataattaagtattggattaatgaggggaaatggtatgctatgcatatatctaggcatggtagcgggacccaaatcggtgggtacccgcccgaatccacccagattttaacgggagaaaaatcaagtttgtggttttccgcgataatcaaaagtgggagcgagggcgggtatgggattactgatacccgccccacccccacacccacacccacacccacacctaccacgtaataaataatattaaaaaataaaaataaaaaaatattattttgtaaatttttttaattgaattgattgattttgttttataatttttaaattatgatcccatattttaaatgtggatttgctattatttttttattacgtaattagtctttttactcgattttttaatgaagaaagctatattattttttaatttttttaaaattttaatcaaatagtgggggtggggtagatggggaaaactcaacccccagttacctgctcccgtcccatcccgccccattgtcatgcctacatatatcttaccaccttttaaatcatttaatgtctttgataatctgcgaataaaattaaaatttatgataaattaatcaatttaataatttttattaaacttgatcaatcaagtaattgttttctatatatagaatcaaagataatatacaattcacattttgtaatgacatgagaaaacgggatgttgagatctcatattaggatttgaaaaaaaaatagagcttattttgaacaatttttatctcataaattagatttggggattggattaccttttactcttagtgccaaagtaaaattagtcttacaattntatatatatatatatatatatatatatatatatatatatatatatatatatatatatatatatgaattgttagtatattcctattttttttaaaattaattcttcgagatattgatatttatttaagtagttgatttttttataataaatatttttttatacctagagttatgaatcaaatgtataatcgttgttgtttctgaaagaaaaaaagcgtatgtaaggcgagcttgtatgtaaagtatttacataaaagtttttagggacataagtaaagtgaaaataaaaaacttttataaaatgagcttgtatgtaaagtgcataagtaaaggtgtttatgtgttagaaatgcctacttctaatattcattattttttatgtagtgctatattcgctgtcgtttctaaacggaaaaggctcatgtatgtacaatgcacaagtaggtgtgtccacccataaagaattttatatcacaatgtacttaaaattaaattaaagagtgaatacctgtcacctaagaaaatatagaatagaaaattgtgcatatttcacaaacaagttacatagtctcctgttcataagaaaatatgactatgatctcatatttgaaagttatacattattgatccttaaaaatatctattatcgctaggtcgactgtaaatgcactctataagattttttttcttcataaatacactaaaaagtgttataagtgggtaattgacataacatctacccacaactttatttttcatattatatttatgactaatttaattgtagtaattcctaattaaaataatagattttaagaaaataaatagtgaaatgaaagaataattattttgaaaagtccaagcaatagaaatagaaagtactcttgtatagcaggtagataataaaatatttattaaccttgaagagggttgaaaaaaactgttagacaaggagggggagaatttgactcctaagtctcttattcaatcccaaaaacattttagtgtaaaatatcaataagcacttatttccgacattaaaaacaatacccctcactaaattgaaagctaagaaagtaagatttaaaatcttcgtggccattattataaggattgtcattcatatctcactatacataatcaattattactaaacggtaaaatctaaaaaattgggacttactcgtgtagtagtccacataggatctatttgaatataatcaataagtatttttgataacttttctattagaaatataaaactttttttaataatttttttttcaaaaaaaattctaatctcgtatataaacatgctcataataataaggaacttctaaaatacttttgctgcttttaaatactgtggtgaagaaatgtaaaaattctccaaagttcactaaatgtagccaaaggaaaaacttgagaaaaacgtagagccatcactcttaaggtgatgtgacatgagaagaaggactaattgacttgccacgtcccatggagaagcctcttgttccatctggcattcttgggcccttagggttgtgttttgtgtgtgcatcacaaaggatagtactgcttgattgagatggtggggcaaggaggccacgtccttgagtgcgccctcttccctttccacgtcctctaccagcccatcctttcttagatcctatcgaattttcttcaaccttcaaagtgatcaaatataagatcatttcaaacagattagtttaaggataaaataattaaaattaacactttaaatttatcaataaaaatatatttgtcattagtatttataaaataaaaaagatctcataaattgataaaaaaaaatcatatatattagtaaaaagattcaacatatttaaagtataaaaaaaataaaatttgttttagatcttaattagcattgtgtcggtcctaatttcaggacttatcatatatgttgcttgaaaataaatcagtgctaaatgcaatcccttttttaaaggataaaacttaaatccaattcattgagtacttttggtatttttgtttaatcggaattagagtttttatgataacatctaataaaacatttcttatgtaaattactgatatgaaattctcattttaattgaagaataacaccaacaatacttttaaaaattgcactaaagttatgttgtaaagggggtgtcttagaattttatgtattgataatatctattgtaatgtgggatgcatgcaaagtaaataagtgtgtttcctatacaaagggctcaacatctgatgtttccacaaaatttgttttgcaaaattcagtttcatgcatatatgaattgtaagaatgccacgagtttatatcttatttgagatttggttgactagaagacttgaaagaaatgactaacacatcccaatgtggcatatacatgcaatgtaacacttacatttgtctcaaacaattcagcattgtttgagtgagaaggagaagaatcctcaacagactcaaaatttataatctcgtcatcatctagatatccatcaaattctgactttctactcttcagaacagattttggctacacaagttacataaaaaaaaatcaattaaaaataagtttatgaaattcaagagatacaatagacaacaaacaaagattaatatcaggtacataagtgcataccgagcatctaaggaacaaccttacacgcatccctttcctccaatttctttcatcatttaacttctcagcctaatcaagtaagaaagaataattaatatgataattgattcatgtgcacatctcaaaaactacaagttattgaagaatagactcacagctttctcagctatatctgatgtttcatactccactagtgcatggagcttgatggagagaagaaagtaacatggggtaagaaactcttgtaattaagtatcatttgaattgttaatgcgtacaacatagaaagtagaaacatggtacgatgtttttgtaccttattactgacgatgaaatcagattttgggcgagaagaattaggctcttggggatggcatattctgatcgttttcacgctgttcatagaccaaccataaattaaaacgtttccaaaatgtaaggaactgaaaaaatgttaagttcctattagtaagcaaaggtttggattcggatagaagaaattcacctcccaactatactgaagattttttgaagattctgatgggaatgatcgtcaggtaaattctctgcaacaacagtgcgagcctacaagagaaaaaagaaaatcacatgcattatgttaaataattagaagaaattctaagactataaaataaaaaattaaaaattaaaaacatctaatttctttacctgcaagtcctctttttccttttcagtgtaaggatgtttacgcttaaccttttttccatcaacactcaaaaccttcaaaatttgcattgtcagagagcaaactaaaaaaaaagaccaaaagtaatgtctcatcgcatccaaaatacttacaagttttgaagatgaacgaatagcttgagtaagcatattaatgttactaacaagagatttaacctttttggtagaagcaattacggttattggaactgtaacaaaaccaacgtccatcaatgagatgtatcatttcaatcctaaatgcaagagagggagaaaactgaagagaaattcaaaatccttaccataaccttcaggatctttattcatctgtttatgaaaggattcatttgctaacaaactcatgtcactgaactgatactccacctattacattccaccatctttaaacaatgaaacctttacatgtcacaataacaaaattcgtacaaaaacgtccataaccaattcatttaacaattcaacctaaataaatccctttattcaatatataaacataaatttgtttcaagcaatggcattaataatcaaaatcttattttacagacaatttcacacggtagatcatccacatcttcttaatgccattccttatttatttatttttatataatgaagacaataagatttaaatctaagaattatacgcaaatcattcaaacctcaccctgttagacctaccttagcgggttggatatttgttttagtccttgtaagatgtgataattttgtttttttgtcttaaagtgttttagattaaaaaatttaaaatattatctaaattactttgagaacaaaaaaaatacaacaatcacattttgtaaaaattaaaaagaaaaaaattaaagagacaaaagtaaataaaaaaaaatgctaaattacatatataaaaatatatttaagccttaaaaaaatgataattgtcttattgcattaatgtaaatcataagtgattagagatcatccaaaattgttataaaaaaatgcattttgattagaattaaaatgaaaacaaaaagacggtgcacctgtttaacgatcttttgttgaagatcaggggtaagactattcttggaggagttgggtagtgcaacattgggagtagggatcaaacaagaaggatcttggtccccaacaaagaaccaatcagctgactcactagacccaccaagaatttggaagcaagggtagtaatagcctgaaactggcatctgggtatgtgatcttggaacaaattcaggtgcttgggcattgaatttgaagctagagtttcttgtttcttgggtttccttttcttggttttcatggatcctctcttcaggttgtgcctgtgccattctctcttgagttctctctctgattattatgttttatgtacgtagtattgtactcccttaagctataactgttttttctttgtttcgatattcaagccacatttcacgctcaaagacgggaacctctctatcttacacaaccgtcacttgtgggcttttgactaaattttatacggttactattcacccaaagtggttcctaccctattctgttttgcaaatccctccgaccatgctcattcttccaatcaaatgcttcaatccttatttattaccattaaaatatagtcataactaaattcatttctaactaacaacacctgtctccatagtacaatttaattatctatcattttaatgttatttatgagtagtgttgagagtcattcaatcgtgattatatttgacaaaattaactaattaatttattaaattataaatatttaatgaaattctataatgaagtaactaaaaattataaaatgattgaaaaataatataatcatcatttatttaaaaagagtaaacatttgataaatatattcaggatgaaaagaaaagaaaatataaaaagctagaaataatgagaaactattaaaaaatcttatttatcaaataattaaataagttttttagctaataaaaaaattagaaattaattgttatgtcttgatgaagataactcatatttattattcattgaaagtgtaaattttttttacataaacaatagatagaaattaaactcttaatttaaatataaaaagaaagtaaaatgaaaatattatcattcaatcatgcataataagattatacaaaagtgtttcataaaaagactgtaaatagcaaataaaaatttgtcattagaaagactatacatgtaatgccccctcaatcatcagggtcattaccaagcataaacagcaaacacacatataatcattagagtttaaacagtttggaagcataactaagagtgacatcatcaaaggtcactatcatacactgtacatataatatggtgaatatacatataatatgtgtttaggtacaaaattgtacaaatacatcccctcaaggtacaacaaaataaatcaaaggcagaatacaaaatatcagagccacatgctcaagtcatctatgcctaaggtttctcagtacaactattcctgcacaggcttcttgccttgggatctattagctcctcctgaggattcacctgcaaaacatatgccccacacaaggggtgagatataaaatcccagtaaactcagggcccttgaaggtatttccttcccctggttcactttcatactcatatacatgaaaatagtatatcaatcatcagtaaaatcattaaatcaatcatcatcaatacaggttcacctgacgacaatcagtgaatcactcaaccaatcctcatgcacaatcaatgcacatctacctgactacaatcaggctagactcatggcatacagccattcatcatatccaacactatcccgctgaggctacatctatgtatataggaacatctccaaccaagaggctacatctatatactaggaaacatctcatggcaggatctcaatgcatctatcagaggctacattcgtatatataggaacatctccacctggaggctacatctatataacgagaacatctctttataaggaggctacatctgctgatataggaacatctccaccaggagactacatctatatcgcaggaacatctcctacctatctcaatacaattgcctgaggaggctacatctgtagatatagaaacatctccattcgggaggctacgtctatataacaagaacatctcacatcaggtcttactcaatcacatgtcatctatcctactacaatacgatgcaacaatcaaccatacaggtcataagctaggcaaaccatagccatacatatcaaccacccaatctcagggcgtagctcacagaacaagcatcacatatcaatgtacattaaattccctttcacagggtgcaacacaacattcagtaatcaatcaaacaatacacaattttcacatatatatgtataacattacacagaaccatcatcctaacaggataatgatagaacacatcaaaggatgcacaaacaagaaccaagagcttacctgctctaggcaaaataccggctctcccggcctcgtggtcaccaccactagcactatcaagctcacgtcctacagaaccaaaacacaaggtatcagtaacggttctaagccgttatatcgaaaggaaaccacaattccttccacataactcacaacaatcacttcacaagtgattctcagaccctcagaaagatcctactcagcctacacaaggctccagagcctcttctaagactctgatcaaagcatattcctgcctatacagatcaattccaaacttctcattctcaccaattcccattggcaaacaacatccacactaactcatgagtaactttgtcaactgctctaaggttcatactagccatataattagtcttttacctctgctcatacatactcagagccaaaaatcaaacttcatcaataatgatgactcaaggctctaacttcatcagaacaaccctctaaacataaaactctacagagtccaagcctaatagcggctctaacacctccaaaacacctctcaaggtattcaaaaccaaccaaaaatccaaacacagaatcaacggctaaggctcgaatttcttacctctgtgtagtccagacacaccagggaatcactttccctaaggtagatcgctcaaacaaagcttccttcgcctctgattcttcgattccaaggactcccttagaaatcgcgatctcatcgtttaccgtctcttgtagagaataaagttgggtctctagcttatctcgaggctctgaacactttctcagttgggtcagaggtgtttagatgaaagatgaaggagatatcaagctccgcagtccaacaatggcttccctctctctcttcctctcttttctctctcattttcgtccaaaacgagctattatataagcctgctcgtgggtcccgcgcagatcgcgccacctctagcgctgatcgcgccaaccgcgccactattggcgccaaccgcgtgaaaaaccaaaggaatttgcatttccagggcacttcccgcgcgacccgcgaggcaaatggcgctatccacgcccctcacatcttatggcgccaaccgctcggtttatggcgctgaccgtgccacgccttaaactgaagttccttcttaggagctctaatgcttgggttatgtttcttaatcacaagcttaatcctatgtttaaaattcaagatattacaatacaaaagtatatatgtaatttcaaatttgatatgatataaatgggtgtatgtatgtagcaataaaatatttttataaaaaaaattgtcattggaaagatatatacaagagtcttcttactaacattgatatttatgtaattttaatttctctgatatatgttgtgagtgtgtgtaaagaaaatatttatgagtggcttaaggttgaatttttttttgtttaattaaataaatgagtttgaacaagcaaattaaacctaataattcactaacagctcaactggtttagccttctggaataaacaatcacaatcattttggaccttaaattagctcttagataaccatcatttttaaaggtttagactcaaatttgttcgaactaatttctttcttgaacataaaataatataatcactaatacacaatcacaatcattttgaacctcaattaactctaagatggaacataaattcaataattgtttatctacattctcattataaaacttcctctaaattagttcaagatagtttggcaaaatgcaaaatgtctgaattggtaaggatatatatcctaaaggaaaaattaaaaatgctaaaagatgattagaagggtagtgatccaagctataatctccaaaagtgcaaataagttgaagtagcttcatacttccttaataaattattttctcattaaccaaataaaaaaaagtcatagcaactagcaatataactctatagtttaagccatttttacctaccacatattttgtaacttttgaggtgtccatataatatgtgtatatgtgcaatatagctagtgattaaataagaaaagaatacataaacgaaattccatttttttattgttaataagcctataacatacttcgtccattttaaagcaattatcacgttaaagtttttaacttattaccataaagaattaaaaaaaaaaaaactaataattttcttcaaactttatcgttatatttttttgttattttcattaattgaaatatgtattaatataatgaaatagacctttttaaattaaaatgggtaattatttatttggtccctatgattaacacaacatgaagttttagttgttaggcaacgagtttttaagttttaaaagttacttttgtacatttgaaagtgattgatgacaagtatataaagggcaagacactaatggaggaagcctcccaacaagggttggaaatactactgattattttttgtttaaatttattattaatgatggttcatatgggttgtaacatcaacattacaccaattacgtaggtgtagatgttttctttgttagggactgtaattagcaccttcttgaatgtttttccttacaccttctttgtccacgaaaaaccccaattcctttaataaccaagttttcgcttaggtcatggaattaatagcacgcatatacactttacaatcatgccagctagcaccacaagaagttacttccaatcctcccaaaccaatttatggcaattttaagaagactaagagtatttctagccatttttaagatccttagattattagagtgaaagaagaatacaatggcatggatcttttgtagtaataaaaataatataaggattaaaacttgcatttttttcaaatagagaccaatttgtaaagtaatgtcatatcaattataggaatcaaatcgttaatttataatcatgtcattttcatgtattatattatgttagcactatcaactacgtcactatgagcttatcaagaaggaccaaaacttaacttttacaaaagtgtagggagaaaatttataaattttttgtataaagactaaaatttaaagttatgtaaaatgtaaagaccaaataaataataaaactaaattaataatagaaagtcactttttatgtaagttgtggtgtgaactaatgtagaaagttaactttttagatcaattatgaccaaaactaatgtataaagtgaactttctaaattggttttagactcaatcaaaatagaagatagactttcatattgattaattgttacaacctatctagaaattgactaacaccgtcgatggccgcatcttcctccttttgtgtcgtggtccattagatcctcttgcaaatgggattcagtttcatgtttctctcttgtcgaggacctggtcttggacctcatgatgaccgtgaagtagtgcgatggtggaggatgacaatagagatgtggtcgttgatggtgacaacagttgacatggggggtgggagatgaacatctctgcgacgggcttgagagttgagggagttgcaaaaaataaaggattcctaattagcttgttatcctagaacaaaaattagatgaaaaatgttggtggcgatagtgaggaagacataggaagggagggatttgcactagggtttaagagtggggtgagtgcctcgtgagtgagtaaaagagggtatttttgttcatttaatttttctatgggtgcaggaagcaaaaaatggagtgcagaaagcaatttctcaatacaattttgtacttttaggcccgatatatatattaggcttctcttatcaagatcgagccggttgagtagttatttgtggtccaaataaaaataacgttttttttccaatctaatcgtacatgaagcttgaagtgggttagttgaaatcaagcttaatagtccaattttaaatacgactaacacaaatatatttaaaagtctaaatatacatgtaatgcaatatactaaaataataaacgaatgcatgtgggccatatgttggataactcaaagattatttatttagaagttatttcacttgatttttattcattatatatggaaggtccaaatgttaatagagtgatctcgtgtttaattatctttgtcatagtattgttggaaaataacaatattatgactgaaataaacggtagagactattaacattttttcacatataaagatcaatatgtaaatgtttttcatacgaatacctaattaaaaaattatatttagtatggaaatcattttttttaatttaaccttaacaaattatatataaaataacttgaaacaaaattttggagtatatgtttagcaagactttaaaaacgtaaaagaagagacagatcacagatgcagatgtgtttgatcaagaaaacataataactataattagaaggaatataatctcattaggaatttggaaagaagtgtccagaatctcaacaatcactttgatattaaatatatatatatatatatgtgtgtgtgtgtgtgtgtgtgtgtgtattatttaaattgaaccttaggaacaaatttgtctcctgttcatgttccatcatattcacaagattctcaacaaattgcacatagagatacaaacaaggcaagcaaattcgacgtagattttggaaaaccatacccaagcaagttaggtcaaaatatcaataaaaatttatggattggtgggtggtggttggcgtttgcgccgaacgcatctcgacgtgtggactctcttggtggcatttccttgtttcatacaggttcatgccatacacacatattatcaagatggaaaattactagttggctggtctttgaaagaatctttcttaagaaaggttttttttttttctcaagcgggaccagaccagatagatgcttgcataaaaatatgggtacatatttttattttattttatcttccatgtgattggccattcaacatattaatgcatgttcatcatcttcttgtttatactattcattactacatagttataagagaatattgttaagattttttgaaatctaattaggttgacttttccatttgagttttggagagagaaattagaatcataagattttcacgtgaacaagtgagacatggtgtatgcattgtaattttaaccagaaatgatagtaaaataactgtgctgtaaaaattgaagacgttataccacatctttataagtttaagtatttgaaatcaatattagaaaataatagaatattaataaagatgtcacacgatgcaagttagggaattaaaatagagaaatagattagatatgttatttgtgattgcaaagtatacatgataaattttatcatactactgtactatgtaagaaactatatatacttttgacagagaaaaaagtataagaagtatatatagtcatacaaaaaataaaatatcaaatacaaattaaccaatattggtgtgacctataaagaagatgaaaaaaacatnnnnnnnnnnttatcatactactgtactatgtaagaaactatatatacttttgacagagaaaaaagtataagtatatatagtcatacaaaaaataaaatatcaaatacaaattaagcaatattggtgtgacctataaaaaagatgaaaaaaacataaataaggtgatttgaacacgtaaaaaatgtcattagaggcaccaatgaaaagaacgtatttcaaattttttaagttttcaaatgtgttgttggttttctctaaaaaaatagttctcaaatgtgtgaaaagagacaggaaaatcaagaataaagacattaaaatattataaaaaaaatcatagaaaataattatttttgaggatttaattttaattttaatcaatataatgatgtactggatttcatctggtataaaaaaaaatatttttgctgttttgaatgtaccagatatattttaaattgtgtgcagttggttggataagctgaacctggtttagaagctgtaaagatagtgtgagagattctatcattttcacttacgcatttcaccaaacagacaatgcataccataattatgaatgaatatcactgtgggctccttcattattttgtttgcaagattctccactataattttgtttgtgaaagtgactcttttgtcatgcatgaaccttgatcgccgatattgataaacattaatagctgacgtttttttttctcccatgtgggatactagcgttaggtaaatggacaaaatgaggtttcaagttcaagccttagactaattaaaatagtgattgcaatgatataaactatatgatcataataaacgattaattaataaaaataatataatctacattacagaaaataaaaaaacattgattttgtattaaaatttcacttttttaagtatcggattatattgataaactattgacaaatactacaatatgcaatatgatattaaacaaaactattacaatttgtgcactagatggttccaatggcaaagccccaaggacatactgaaaattggacaaaaaggtagaacaagagaaaatatggttcccaagtgaatcttccatttccgaatttcattcaccatacttatgaatttcattcaccatacttatttgatgttccctgaacacgcctaaaaactgaagttaggaatattttggagacattatcaacctaagttattgagttgttattgaattaaatattaacaactacccataattaatgaggatggatatagtatcatagagataatgacacgaaataattttacaagataagatgagtagatgactttcctcgtgccttgtcatggtgtatatcgatccaaagcagtcaccgtgacctgcaagttgaagatcaacggcacatttgtgctagctaatccaataaatgaaggaggaacacaacaaattaattggtaaacagttccgaaagtttgacacgtgtaacttcatttattaggtaggtttgacatgctaaaactaaaacatcaagcaacctaaaaatatttctttcacatttaatttatattgtataaattattatgaaaagacatgagttgagactaaagagaaaacacaaatatatatcaatcgcactcctatcgtctacaatttatcgtattttcccttagaataagctaaaatcttgattttgacacatgactttgtatagatttcattttgatacttttttacaatatcatttaactatatatttaatatattatttagtaatgtgagttggcatgagttgaaattatttgaaattttcaaatatacgacgttaagtttgattccaaaatttatttgtgtaaaaaaaaaagttttgagaagaaccctctcttcaatgtttgactataaaataaataataattgcctaccgagttagaatactctggatataaaaagttgtagaaaaatagtctgggtacgcataatagaaacggattttacaatatcatctactaaaattaacatgtatgacactataacatattaatcaatttttataataattatcttaaaattatacttattttaactttgagtgattgacagtataaaaatattatatattgtcaatacatatgtaaaaattaaagtcaattttttttgttaattaaaaataatttattttattataataaagattttatattatagacaaaaataatgtcatgagaaataaagtgtacataaatcaacaaaccgtcaattgaggctaaatttaatatctgcgcctaaaaattatgttgtttttaaatttttattcgtttaaaaatattagaaacatatattaatatattttactatccaaaacactaatacaaaaatcaattcacataaacaagaatttgctttattttaagggtcattccgccgcattctcataatcataaacaagacagggaaataaaatttgttttcgaaggccgtgtactgacttgacacattgcaatcatagccagagctcaatatgaatgaaatggcagaaacacttcttgttcagtgtttcatcagtttgtgtgcaaagaacaaggcatcctctgataagagagagagagagggaaaaaaagagtacgaggaaaagaggaataattatgaaaagatatctcaaaaatttgtttaaatgaaattatgagaggaaataatccatcctccagcaattagaaaagccaatgtccacccaaacatgcagagatgagacccaactaaatattggactaattaatttcttcagggggcatcagagagttcccatgacaaaaagaaatgaaagaattgtatgatgtggaaaaggataattttaattgagattctcatatcaaaactcacgaagtatagaaggcaaagctaaaacttcaataaaaactccaacagcctcttatcgttgaccctctttttttatgtatcatcatgtagtattattcttatgtagtggtaaaactcctcccatgtatacttttatctgcaaaattcatggtggagagtagtatcctatacatcaacttttcctgctttgtgcatatgacttttccaactaaaactctcggatcttgcatcttcatcatcttccaagctgtcaccttcagttggggatgttcctccccgggaccctgcagccaaatgaagaggactctgaggagaacctgaccctgaactgctaacttttgaagagtcattatactgatcttgagacatccacaaacctccaagaaccacaactggctgattagaacttgcagctggaactctccgcgtatgaagacgatatttctgcattcatacatgaccatatatcatcagtctaaatacatacttcataatacaattaaatcttaacatgatctttttccataaatgcctcaagcaactaaacaagcagttaaagggaccaaaacaaaaaaagttccaagaactcacttgtaaatggctcttcacttcatcgttagtcaggccatcaacttgcataagctctctaatttgctttggtgttgctactgcaattaacagaacacagaagtttaattagataaatgaaccacacaaagtgtaacaatattatcttgcccttccaaataaacttacagattgacagataacacgacatgtgtaacactcctatgctatctatctgtctcctgatctaactttacgatagtcccaactttacacatgaaccaaacagaacaaacactacctaatttcaaccaacatctataatttcaagttcaacccaattccagcatcatattcccggactactactaacctataatttccaaattcatcaaaaattgagtctggtgtaaaaacccatatcagaaattgtaaaataacatgacatttctagtttaagaaagtgaaatatacatagatcacaattcaatttcatatcaagattgaaaaaaattaaaaaataaaataaaataagagaagcatttgagtttctaaccttgagaacctccgagcttctgcaaggcattaacaaatcgtctgtgcaactcaggggaccagcatctcctctgtttcctagcagtctgctgaagtgaagtcgcacgcaaactcggctgaaccatgggaggagaagaagaagaaacagccctgttggaactgctccttgatcctctcgaaccacacccttctttcacagaagaaggtgtcagaagagaaagcctattaataacactctcttccttctcttctttggatgcagcagcccccaccagtcccactgttgtcaccggcacagatgatgatgaagatgagtacctagaaaaaggtataaacgcccttcttccttcatttctattactacaagtctgaaaaggatcctcgactacggattgcccttcttcacttttctgccatcaccaacaaaccaaacaaaaaaatatctcattaacattattaattgattgcttgaacaatgataatcagtaataatctcagtatattagtagtgatgtattcttttttctttccatttttgtgtaaaaaatcttagcatcctcataaaaattaaccttccattattgatgctgctggtattgttctctgatcggaattagagtttcacatttaccttcaatagaattctttattatgcgaattactgaagtaaaactctagttttgatttgaaaactaatacttaatgcacataactgaatctaggttttgtgttttttagttacttattcaatttctaccttggtttgtaatttatgaagcagttgtttgcgatcagaggcattgttattattagtgatggcagtagtagtgttgttattccagagctgaacggaactcatccaattcctcttatccctgcattcgttgtcgtcatcatcatcattctcttcctcctcgctctgattaccacgctccttcttcaacggaatgaactcctccagcaccggcgcagaatcacgcgccaccgtgcatttctgcgattccgccttcagaacagtaattgctgcaacacagagagaaaaacgacgaagtttagatgcgtgtaaagaaagatgatatctgtgaataaatataaataaatttcaatttcaaattctcctgtactgttccaatgtttagttttgtctggccaaataaaaataaaaaaaatataaacacggatgcacgggtaactaactagtaatacgaaacgcggaacgcgaaacgcaccgtcgtttaagaggagcatggagagggggagttcgcgtttgaaggcgtggatcttgcggagctcgtcttcgaggcgggcgaggaaatcgtggagggtggcggggtggtggtggtgttggttgtggctgttgttgtcggagaggtggcggaggaaatcggtgatggttttggggatgaaagtgggtcttaaatccaagctcagttctgcgggaaccaaacccattggattggatttggatcgatggtggtgttggtttggtgtcctcagattcagattttgagaagaagaaggaggaggaggggggaaggggggggagccaaatgaatgaataaatatagagaaaaaaaaggaaaggaaagtgggttggatgtgaattgtgaaggcaaatttcaaaacgtgaagattctgcggaaggaatgagagagagagaataagaagaaagcaacgacggaggttttgaaagtcactttcgggtcctcgcgtatttaatccaacatctccctcccactctctaaaacccattcctattctactttttattttttattttcttcaaagttaatagtagtgatattattcttaagagtaagttatggatgcgtttgtttaaatttataataagtaattttaaaataagttttttttaaaatgtttatttaatgaccagttataatttgattattaaaataagtagaaaattattttttaagcaaaaataattttattaaaataaatattttttaataaataaatttgaacaaactgatgatatatttatcatgtatgaaaataaaataaaataaaataaataataataatttatgtttcttaatcgaattatttatgatttgaatcctaaccttgaataaatcttattaaatcttataaaactcatcactttcaccacgttaaggtgacactctattactgacttatatttcttgtctccatagagaaatagaactgactaatcctaaggtaaagggtcaagaaactcaacgccactattcttaaataacttcttgaagttaggttttcttttcacactattacgaatacgaaaattatgaaaaaaattggattcaattgtcaattgctcctatcgaaaataggattgaccatggattcgaacaatagcacatgatttcataaaatcatacgattttcccaatgtaaataaagcaagtttcccatgaagaagatttggttaagaatgttttattctgtagaagaagaatccgactcaattttcttaaaaaatagagaaatcagaatcaaatcaagatgatatagatcaaccccacctcttgcgttcttgtgccaaagatcttaccatttccgaagtaatgaagttgcatctatttttctttgtatttctattttactattatattttactatattaagattttttatttatttccttttctcctaatatagcaatttttaaaatcataattttttacttttaaaattatttattattgttgattttaaaattataaaaaatcatttttaaaaataggtttataattatgtggcgtttccagagtttttgttctgcttttagttttctaaaatttattatttttttaaaaaaatcaaaattaaaaaaatatgcttttatttttctaaatttattctaaaaaatgtatcataattttaaaaagaatttaatactttaattttactttttcttttattttttttttcatttaaccaaaatggtggattactcacttccacattatcaatatgcagttatattaaataagaannnnnnnnnnnnnnnnnnnnnnnnnnnnnnnnnnnnnnnnnnnnnnnnnnnnnnnnnnnnnnnnnnnnnnnnnnnnnnnnnnnnnnnnnnnnnnnnnnnnnnnnnnnnnnnnnnnnnnnnnnnnnnnnnnnnnnnnnnnnnnnnnnnnnnnnnnnnnnnnnnnnnnnnnnnnnnnnnnnnnnnnnnnnnnnnnnnnnnnnnnnnnnnnnnnnnnnnnnnnnnnnnnnnnnnnnnnnnnnnnnnnnnnnnnnnnnnnnnnnnnnnnnnnnnnnnnnnnnnnnnnnnnnnnnnnnnnnnnnnnnnnnnnnnnnnnnnnnnnnnnnnnnnnnnnnnnnnnnnnnnnnnnnnnnnnnnnnnnnnnnnnnnnnnnnnnnnnnnnnnnnnnnnnnnnnnnnnnnnnnnnnnnnnnnnnnnnnnnnnnnnnnnnnnnnnnnnnnnnnnnnnnnnnnnnnnnnnnnnnnnnnnnnnnnnnnnnnnnnnnnnnnnnnnnnnnnnnnnnnnnnnnnnnnnnnnnnnnnnnnnnnnnnnnnnnnnnnnnnnnnnnnnnnnnnnnnnnnnnnnnnnnnnnnnnnnnnnnnnnnnnnnnnnnnnnnnnnnnnnnnnnnnnnnnnnnnnnnnnnnnnnnnnnnnnnnnnnnnnnnnnnnnnnnnnnnnnnnnnnnnnnnnnnnnnnnnnnnnnnnnnnnnnnnnnnnnnnnnnnnnnnnnnnnnnnnnnnnnnnnnnnnnnnnnnnnnnnnnnnnnnnnnnnnnnnnnnnnnnnnnnnnnnnnnnnnnnnnnnnnnnnnnnnnnnnnnnnnnnnnnnnnnnnnnnnnnnnnnnnnnnnnnnnnnnnnnnnnnnnnnnnnnnnnnnnnnnnnnnnnnnnnnnnnnnnnnnnnnnnnnnnnnnnnnnnnnnnnnnnnnnnnnnnnnnnnnnnnnnnnnnnnnnnnnnnnnnnnnnnnnnnnnnnnnnnnnnnnnnnnnnnnnnnnnnnnnnnnnnnnnnnnnnnnnnnnnnnnnnnnnnnnngactcgaactattattacaagttttggtggatcaaatttaggttttttccctacaaattcaataggtattatcaattaaaatatattcgttgagttattattattttttgataagatcatgagatattttcataaattttggtgggatcaaacttagttttcttcttcataaattcaatatgttttatcaatgagttatatttattgagatattattattattttattggttgatatactaacttaaatttaaaatatttttaatagtatatgatcgcttgctcattggaccacttttaccttctttactatcataagcagtttgacaggccttttgatccaaaaagatggaaatattaaaaaaactttgtgagaaatctaaaatgtaatttgattcannnnnnnnnnaaaaaaaaaaaaaaaattaccatgacatccattatctcattacttctttaattaaatattcaattcatttgttaactagtaagtagtaactgctattgcagtaaaaaaatagtaactactaaactctttatatttccagtcaaaacactttttatatttaattacaatttttaccacaatttttttgtagcttaaataaattttatgtttaattgataaaaaattatgtagagtgagtatgtgaaaattggtttgtgagaactttttatgttgaatttaatttctaaattatttacaattaagaggtgctttatacaagtataacattagcgtttaaactatatttattttaacttttaagaatatgattcaatttttttcaatattaacaaatcattttgtattacaatttacaggcacactttttataatgattaatttctctattatttgcaattaaaaagtattgatctattgaaataaaataaaaaannnnnnnnnnnnnnnnnnnnnnnnnnnnnnnnnnnnnnnnnnnnnnnnnnnnnnnnnnnnnnnnnnnnnnnnnnnnnnnnnnnnnnnnnnnnnnnnnnnnnnnnnnnnnnnnnnnnnnnnnnnnnnnnnnnnnnnnnnnnnnnnnnnnnnnnnnatcagcaagaatggtttggtcgggtcaaatgatgataagttattttaatttattttgtatcttttgtcaaaaacaaagaaagaacatcttttgtgtctcggttttgatataagtcaagaatcatctgcttttggaatgagaaggtacccaaaggtggaatttgtgttcatggagattccaacacgtgtaagatagactacaatttaatttaaattatatatcataaaaaagtgtcattgaattattaatcatgagtctaaaaaataaaataaaaatataaaaaatgctttatttttataaaatcattattctcctcaactgacttcatttatttagaagcaaaatggttatgtattcggtggttgagataatttgttttttattcgaataaatgtgtgtttacaatttagtttatttaaaattagtaatgatttatttttatatttttaaagtattttgaaaaataattaattatttttttaaaacgtagtacatttcttttttattagttttctgagaaagaatttaaaaaagaaattatactttccatgattgtttatttggggtataatatgtatatacatggacatgattagtttatactaataaactttttgatagtattttataaagtaaattttattaatctaattattgtatttcaaattttcatgaagtaaattacgtttacaaattttacacaatttaaaaattaataaacattttaccaaaccactttattttaagtttaaataataccttttgtccttgtttaatcgtcttaatttatacctttatcctttttctccctcaatttggtatttttatctcttcatttattttcagtttcacgttttattgtattattaatttcagtgtcaatcnnnnnnnnnnaaaaaaaaaaaaaaaaattaccatgacatccattatctcattacttctttaattaaatattcaattcatttgttaactagtaagtagtaactgctattgcagtaaaaaaatagtaactactaaactctttatatttccagtcaaaacactttttatatttaattacaatttttaccacaatttttttgtagcttaaataaattttatgtttaattgataaaaaattatgtagagtgagtatgtgaaaattggtttgtgagaactttttatgttgaatttaatttctaaattatttacaattaannnnnnnnnnnnnnnnnnnnnnnnnnnnnnnnnnnnnnnnnnnnnnnnnnnnnnnnnnnnnnnnnnnnnnnnnnnnnnnnnnnnnnnnnnnnnnnnnnnnnnnnnnnnnnnnnnnnnnnnnnnnnnnnnnnnnnnnnnnnnnnnnnnnnnnnnnnaaaaaaaaaatccttcaatttgtaaagttataattatttttacgatttctatgtaaaagtgtataaagataactacgtttatgacttattcctatatgaaaattaattcaaaaaatatctcatttggtaattttgacaaaaattaaccctaagtggtaaaaaaactggactcgaagagggcaaagaaaaagaataaagaagaatttgattgtatagtcttttatctcttttaagttacacacttttgttctttatatataacaagggtttgctaacatacactcttgtttagcaaattataattagaaaatatcttaaaatacataatgatatatcttattaaaacactcatatccatactaacaaataaggaggtatacattaacaaaactcgtatttaaaagttatatgttaacttctttttttaatttgatctttaatgtcttcttaattttagttttaactatgtcttttcattattattatttttttgtaaattatgggtgtaaagacacagataagaagtctcagctaggttagcaccccaaacatccattccacaaccacacaccaaataatattaaagaagaaaaaaaaaaggatgaataaaatggaaggactagactaaaatccatgaacaaaattatacaaacctattattagattactaactttagtgagtgtttttttaaccgctacaaataataaaaaatgtgaaaaatttttatcaccacaattaaggaaaagaattaaattaaatcaaaagggaatagagaagaaaaaaaatgacggaattaaggctttacatgaaaaaaaaatgatgaaaaatatgatttaaccctattttaacatataatgtgatatttaaaacataaatattattatgactacgtacgtgagaggaggtctatccaccacctttgttaactttgttctccatgataaaaatccttatttaatatttgcaagttatctttattctctgtggctctcaagtctcacctctcacaacattaaacatgtcagaaagttcatccacaattcttgagttgagaccacctgaatgaatgtaggtcttatcttcttttttttcggtatcttgtgtttgcttttcgatcaaattggacattttgacaaaatctccgcattaatattttgattttggatggaaccttcaagtattaagtatcctttgacaagctagtgttccaatttaacggcatcacgcctaagagatcggaagaatattgtttaaacactactttggaactagacttcatattttcctttcttaagcatattatccaatccaattttttcttatccccaatgaatcttcactttcagaatctcatcatcaatttttattaaaagcattccagatgttagtacaactgtcaatcaataaagactaagctaaaggagacgtccaaagtgcattaggtggaataattttccattgaaggtttggtatccatcgatcctctatgatatgtatggagtgaacataatcgattccaacaaaatcacacaacatatttagctatgaaggggaaaaaatagggggatatgagataaaataggtaatgtgatatgagagtactaataacactttttctaatgttttctttctgacaaattatttgctatttattaaaatttattaaaaacgataaatttaaaaatctgatttctaaattaaattaggagaaacttattaaatgataagtgatgtttattaaattttgtaatgttcaataattttaatgaatattaaaaaaagtattgctaacatttctcatgtgctatgtacatggagagaaaaaaatgagttgtattaaaaattattattagtttattctacctcatgagtcataaacccccngtatatatatatatatatatatatatatatatatatataataataataataataatagaaaaacgtgttctcatctactaagatcacttttatctttgcaatagttttcagttgcatattttccctttctagcaaattgtatataaaatagtgagtatatctttttccgatatacttaatacaattgctcagagaagaaactctctttcactctctttatcacttcattgacttctaatgatggaacttatttaacaatgttgcttagcaattaaacagttctgataaaattggcctaagagcctgatgtggcaaagtccatgaagtagggttaattatgtatttagcctcgcaaaagattattgagtcaacaggaaattaataatatttagctaatgatacagggcatttggaaccaattttgaagaaatgtagagtcgcaaagcataatctttaaaacgatattggagaaccttttacgcagagaataaagataaatggtgacaaggtgtctaatcctttagtggtcccaatatagcctaatttatctacttaatcacaaaattaattaattaattaagaaaccatggagtgtttttgacgtaagaaaacaatattttatactatttaatatgttccacttctattataatgtttaaaaatattgtaaaagtaaaaataataataattcatgtaagtgagatactcattcaaagtataaagcaaaaaacttttttttcttctctaaaaaaacacatgagaatctctctcatcaaactagaagagaccggagacctcaataaagcaaaaactttttcttattctacttacacatgagagtcctcttcattatggcattcgaggaaattttataccaataataccatccctcctaccatagatttgactcttatctacttcgattcctctatcctctaattttgattttcagataataagccatctcatgaatcaccatgatatttttcagaaattactccgccgttgattgacgactttggtgagttgtaggagataattttttctgtttacgattgtaattttttttatccataaaaataaatattacaaaatttacaataactcaaaatattttgtttcaactaaactatatttcgttggttgtatacactcgctcggaatcctttgtgtatatataagaaaatattaaaattaaataaatattaataaagaaaaatattttcttgagttgatatatacttaatttttttctaataaaagatcatatatctagttttacacataaaattaataataaatattttttctgttaaacttattacgtattaaaagttaaatattttaaataattacataaaaaaaataatctcccttaatacacttttagatccatcttcgtccctcgttgtacgattgaaattaggtgccaccggtaaagagaaaaatatatacaaaaacattgaagatgctatttggctaatatactaaaaaaacatatttccancaataacgaagttttaatggcaatacggttactatctacctatacatatgaaatgaaaaattttacaattttgagaacacgcaaaactgtgtttaattttgttaaaatagaatcttatacaagctagctgggcctacggtttgaactaatttccttttcggcgtgtacaattcgtacaaacttaggtaaagagtcatttcttcatgaaagtatgaaatatttataaatttatttatgaagaatgaaaaataaaatttagtttccaaaaattttaaagatagataaatttatcttatcgttaatttttatctgttaatattaaaaaattcgttgatgtgacacacaaaatgaaaatttcaagaaattattaaattataaatgtatatgtccataaattttgtgatattttcatatttgtgtattatataaacaaattttctaaaaagttaaaagaaaataaatttgtctagttttttatacttttatgaattatattttattattttatcttttaaagataaatttattaatgcaacacatttttaagaaaaaaaatcattatttatcttaaaaagttatgggcaaagtttgcatatactaattaaatttaatttttagaaagatggtgtggaatcctaatctatctcacaggctggccagatacctctaacaacattatcaactactactatcatatattgcgcgtgaaatccacgcgctagagcatatattttttccaatctcaacatggttctagagataagaatccaattgtgcagtggaccccactttacgtctggaacattgcacataagagaaagatgctttttttccttttctgttcgtatttttttattatttttctttttatatcaaacatgtttttcgtaggaaacaatttcattctgatttaataaaattattgttgataataatattattgtttaaatatttaatgcagtttaatacttagaatttgaattcaagatatttgattaaattgaaacaattttacattattttatgcacttaaattgttttttttttaaatttattgttgaaaaggacaagcttttacaaccgttagattccagttctcttccacagaattaagaatctctctcgctccacaaaattcctttttttatttatttattaatttatcatgatttggtttaagattcacacctttattactatttaatgtttgattgaatttgataataatatcttattcttatcttaagcatgcagttttgaattgttcgctcccgtttcccgcatctccactgcttttgtcggatgcttacaatcaaagaatccacacttgcaacaaagaagctacaaatgccaattttcataaataccctcataacatgcttatattttttaatatatccctcatttacttatctctttctattttgtatcctaatcaaataattgtttttacatgtttgacaccgttatatgggtatttaattctcacaccatcaatttgacaaattgtccctattatattagcccaaattatccaaaaaaatatccaaatttttgaataatttacattaacttaacagtgatgtccaccgagctatcacttattcaaacagttatatttagaagtcacaacattgattaatattgtgtttcaattagcttcataataagaaataatcaattatttttttatgataaagtaaaacaataaataattacttttactttttcatattatcattataatttttgtaataaaattgattcttgtgtgttatatgaacacactataagtttgttagtttattgtttgtaaatttggaattttgattggacacatacttcaataaattgtttcttgtttgcccttatgttgacttgtttgttgtgacttcaacaggatgtttaattagggactattttatatatttgtgttttttgaagtattttctaattaaaaatcatgtttaaaaacttttcaaaaattcaaaaacgtttattttccttaaaaaattcattaaacttataaaagtactcttggtacttttttatataacggaaaggaaagttttaatatgaaactgtaaggtgaaagatttttttctttgactgggtaaggtgaattttatatacaaaaggttgtttttctttgcagggataaatttacatgaggtaagataatacgacgctaattagtcaatcagatagatgtagcacacttaataacaagttaaattaatataagatatttggtcaagatacggccaaagtactattgaattcattgtgcttttgggccaagaaaaatttgagtaaaaatcaaataaaaaactatcctaattcagccgaaagagtctagtctaataagtggtcttccgttttcagatgtgtgcacaaattcagctttctttatttctacccataaaataattaacagtaatcaattgtcaactaaaataatagtactaaagtacgtggcatataaatttccaagaatagtgaagagcataatggtaattttattcttgccgtagctttcttctattgcttggttattattatgttatgttattccccaaagcagtcaaaggggaatccttcttccaatggaagtaatgatagcatggaattgaaaacaaccgggtcttggatcatgagtttgctaggatctttcaaatttcaactcagaacaaaaatatttgattaggtcaattcaaggaggaaaaaaaagtggaaacaaagtgggaaatatgaaattttgattcttagtgacaaagacaagaaggggttgtggtgggtggggggtaacttgacctagtggtttgtggaaggttagctagttgccaaccaatcctccaaagtttgatggccaaagcaaagcatcatcatctattttgaggagatactctcaaaacaggaatccaagaaatgggatctgtaacagttacttgcccaatttccatacttctctacccctaacatggttaaaccttcattttattaaagctttaaatcctggtgatttgctagtgagacatgataaattattagatgatttaagacaattatatcatctttgattccgatcattaattatgagacacttgaacaattcaatattttaaattttacatgatcccttaaattaaggataacaatattaatttttgattattcatatgttgtgtgattatttatagcgaacataaatgatatgataattctgaaccgtctaattatatcataccttattttctcatgatatatttcaagaaaacttgattagacaaatcacaaatataattaaaaatttacaatgaaaatttgacaactattaaagcactatagtcattagtcaattttttccacaccaacaacttgaaataaaatcttcttgagtcttgcctcccaataacctagcacgtgctatgcattacaccaaaataactaataaagggtcactttgattttggttaatttttatcaacaccatcaatttcagataaaaaattattgttaattaattactaatacaaacttatcttgttacgttataatggaacttataatcctctcctctcgatcacattataaaattgagagattcatgattctatgaatagaaagttgttaatatcgagggtgcccaattgattgaaggtcatcttcaactttacaataggttcagtgaagagtgcaatttactttcactttcaaccccaacttgttttgattggatccggagaacataagataccttatataagagctttagacaaattcaaattcccccatccaactaccaaaataagggcatctttcacgtgatgacaagctcatattcatgggtttaatggcatttgtgtcagtccttcatgaaggcatctatttgtccccaatccatgtgataataataacaacggcctggattttttccccctttgtgatggaatcttttagaataatgactcatagtaccatctaacagtttttcactactttgtgaggctgtttttggcttttagagtttggtgtccttgtcttcttttggggattgttttgtttgtgacattattattgttgctcttgcttggcccttgcaagaaatccacttattctcctctgtcacacacacacacacaatacatcatgattcatgattagctctaatatctctctcttttcccttttctaacatgttaatcacctcctaaattcttaacgcttcaaacaaaacctctccatataaccatccataagactacaacttgaaaaataacgatccaattatatagtatatattattatatacaataaatttgttaatttttataataacaaaaattattctaataattttacaatgtcattaagtcacaaattattatatattataagtcctttaacttttacaattattattttaagagttatataaataacttttacagagtgtgtcatcattacactattaaactataaagaaattccccaataaggttactttcgtatatatgatggctcttattttaattaagcttatagttttgtaggtgaaaaaaaagggtatatagattgtagttcagaaactttgactggcaaggaaaattaatggcagtcaataattatgaggaatgaattttacgcttgatctgttgcttcatgcgcataacctacagtataatgataagtcttgttattctcactaacatggtgcactgagagtgagagtgagagagcaaaggataagggtcgctttccaatgagaagaagagtattccagactcccatatctattttggttgctttcggacaaattcaaccattttagtaatttacagaaccaaagttttttaagataacagtaaaatcaattgcaagctgcatgcgtttgagcacacacatcaataagggtggacatatacttattggttgcataaatatactttctatatttttatttatttattttggtattgttttatctttattgacccgaggatattaaaagaagaaaagaaaaagtaacattttagatggggtgaacattattgtttttttctcgtgtaaaagtttagagagaaattttccatctaaagccatatgatgtcaaaatatttataggtcttgggcaaaaaaagactacgaattgaataatattcaaactcgtaacctcacaaaactaacttaaagcgattaattaaatgtgcaatattacactttttcttcttctttcaaggcacctattcctgtatatattccagtctctgaaacaattggaaacatgcatgaaaacgcatcaaccgcaataggggaaaaatatgcatttcaggaaataaagttcataataggtacgatattaaataaactgtgttgaaattattaaaggtttgagttttgaaagcattacttgtggagaaaagttaataatacttgaagggaaagtaatgccatgtaatttttttcttattaatatgcaaaaaatatgtaaatgctttaaaaaataaaaaacaaaaaaaagaaaatattatcaatatattccgtatagccagaaaaaacatctcaaaagaaaacaatgtaataatacatactttgcgacacaaagaaaacaagagcatctttaattaattatattcacagccgcgtagttaatatatagaaaacaagaaaattatgaaaattaaaattacaacaaataacaatatttatcataaatatgatagttatactttcgtagaagatttattattttttggaaaattatttatatatttttattgaaacttttttcggaactattgctaagaaagtttttttttctgagatttttttggtanttaaaattacaacaaataacaatatttatcataaatatgatagttatactttcgtagaagatttaatattttttggaaaattatttatatatttttattgaaacttttgtcggaactattgctaagaaagttttttttctgagatttttttggtaattatttctatcttgactgaaaaaaaaaaaagtagatggaaacgtgggtgcaattggaggagcctggcgtgacggtcgcaaatgatgagagagaatcggttctccgcatatgaaacgggggtgcttttagcacaacctaactgggaccacttcctattaagaaattcttatttggactaacactgttcctccctaattttgtgattttttttagaaaaatgctaattaatgttaatcggtaatattagtactttaattaagaaattaaaatgaaaaatattttattaaaatacgtaaagttatattatttataatttttaaattttatataatttttacattaaataatttctttttttttatttcttaatttggtctgaatagtttgacgggactttttatttttaaacccacgccctaatttcatagcagtagcacattgccaacttttggctttaatgcaaaattaagaaaaatgttatgagaaaaagatgacatgtatataaagtattttgcatatgtaaaataattatttaaaaatatttcaaatgccggagatcaaatacttgtttcaagtggaattacatatgagctttggaatcaatatattttatttttaagtacaggatactcatgttttacgtcaaatgcttaaaaaaaattagttgatatctattttgaagttataaataaatttatttattaaataaaaatgcaaatatctatttttttagtaagcacggttttatgaatttttaatttaaacaatttttttgttaaaataagtattaaatttaaaaaattatgatataaattaaaacaaaagttgaatacataattttgatgagaaagttgaatacatatatttgttacgctaagaaatttgctcaaataaaaaatattattatgcttgcaagttttctttatattcagttatttccaaaattttaaaataataatgaatcttaagtcttaactataataagcgttttgcatataatattatttaattaaaatatttattgaaaacgctgttaaagtattaaaataggtctaaaagttacatctaataacaaaagtaagtaagattgtcggattaatattcttcatttaattttcatcaaataattattntgcatataatattatttaattaaaatatttattgaaaaccctgttaaagtattaaaataggtctaaaagttacatctaataacaaaagtaagtaagattctcggattaatattcttcatttaattttcatcaaataattattaatcatttctataaatgtcacgtcttaactctttgtagcattttgaagcaaagagtttgtagtcaattcttctttattgaagggcacctcttgtgctcagtataactgtaagctctcatatatttaataaaatttgcttataaaaaaatcttcattattgtaaaaaaaaaaaaatcatctataaatacatttatattatagtcataatttactctaattctatattttttatcttaaagtaaacaattgaaaggattgatcgggtaaaataagatatagttttgcatttatagatcacaagtcatcatcccttccttctaaatttttatttcacaattttttaagtaaacctaacatgcatcattatagctaatataaagataaacttatatttatagtctacatctaaaactaaaggtaattaaataacaagtgaatcgtaaaagtaaacattctcaactaataaatacataaaggaatggttgtaaatgggatgatgggatagcaggacatggatttctgccaccaacatccacgttagctctaaattgaacttagtgtttgacactttcattttcaaagcatagaaagcatcgcaatcgcactaagcacttcttattgactaccaatttacttgaacatccttaccgtaatatctgactttgaagccttttagataaacagtgtttaaatcagacaatgtaacacctctacagataagaaagtgtgttacaacttacaattacagattaaaaaataatcattgggattggaacaatcttaaagtttattttaaatttattattacagtcctaactattaaatttttaattaatgtatactttatttagaagaatcaaattcgtattagaaatgcttatactcaaataggattgtgcactacactgatctcgcataatttactgtaaaaggaatgcttgtcagttatcatcatttctttttttaaaaaaaaccatcagttactccagaaaaataaaaagaaaataaaaaactaatacattttccttcattgtcatccatattaagctttaagcctatgctgctgcatttataaatttcaaggaaacagcaaacttcgaaagagaaaaaaatagtaagaaataaattgggccctaacttttaaaggaacctaaacatttgggcctaaacattccatgaccgtgatttctacccggataggcccgcactcaaatataacagaagaagataaatcacatatttaaaaatgctttatgaacttataaatacagtgatttttttcttcttttttttttattattttaaactctaaaagagtagaaggacgctgtgaaccatttttaaagatgttttccttgagcagaccaatttagatacggaaaggttaataatgggaactaacctaggaagaaaccatgggccgtagctgaaacaaattagaaatcaaaaggtaaaaaaaatcaagaaaacgtctaataagagaatatagacagtaggtgaaagaaaacaatgaataggccaatgttctaagttctaaccgtggaaggaaaaaaaaaaatctttacagttaaaaatttaactgcatcaaatatatcgttttatcataacaaagaaagtgattcaagattgaaatgttacaatttgaaacaacaatattgaatcatgatccccaaaggaaacagttttccacgaaaatactagacatcaatcttaatatcttttaaattttatatttaccttaagcttttcttttttttaattatttttttagttttgaggagggcctaaggctcgaaaacagcaaaattaagaacgcacaacctggcctggaagggagggaggtgagcttacaaacaggaggtgtatttagcaagatcctatgctggttcttacaatcctaaatcattaggtttttcttcttacaccattcaataatccaacacaccattcaatttttttttttttaattccaactttatcatcttacccttcttctatctgtttcttcttccttttcgcttcttcttcttcgttttttctcaccttcgtcatttgttcttcttcccgaacctccttctttcgttggtcgatgatggttgggtagctgcattgtctttggcttcgttgtcgcagtttggaagcaatggaggtaagtttttttttctttgaacgttgattcgtatgcttcatatggattggcaatccgtatgcttcatacggattggcagttcgtatgcttcatacggattgacagtccgtatacttcatatggataagcaatccgtatgcctcattcggattgccaatccatatgtttcatacgggttgacaatttattggcctcatacagattggtaattcgtatgcctcatacggattgtcaatccatatgaagcatatggattgccaatcaacagtgattaaaaaaattgtagtgaatttgtattatattaacacttaaatcaaaagatggaaagagaggaagaacttcacttgttttaattggttgtgagaggagtgaaaagtataaagtattcaagttgatataggagaatattgaacattttgttattgtttatacatttgtaactcagatataagacaatttttgtgaaacaaattataacttagacatgcgtaatgaagacaatttttgtggaaatcattataatagtcatatatttattaaacgcatacattatctgtatcctcaacctcgtccaccaccatctcttccttacgtttccctccttcgtctagaccgaacataaacattttcgtactcagtgacatccctggctaatcttatacaatggtctgttatagtgtatgcatcagtgctagcagtaaccatccgcatatctatcatgtgttgcaagctttatgctatcttttgacacacatcctgagacaataacaacaacatattaataaatattgaaaaatgtaacataaaatttttgtaacaacattggaagtatattattgaaagtattttcaaaagtattctaggcctaacaaaaataaaataaaattttaaatttctatttattaaatttaaattgaaaaaaatacatgaattgagcgaaagaaaaaaaaattcaacaatttataagaacaatccattaatttttgaaaaaccatttcaattcagtcaataaattcaataaggatcttaatgctaaaagaaaagtagttataatttttttttgaaaaaatggccatacggattgccaatttgtatggattacacaaaattgataatctgtataaggcatacggaattgataatttgtatgaggtatatggattgttaattcgtatgaggcatatggattgtcaatccgtatgaggtatatggattcatcatacgggttgtcaatccatatggatttacataataacaaaagaaaaacacagataaaaaagaaacgcgacagagaaaggtactcacaacgacaatgatgaataaccggttagataaaggacgatgaagaactatttgatgagatgaacgaggaaggtgggtgcaggaagaaaaacagacgataagaagccgagagctggaagaaggataatggtgcaagaaaacgaaaaagataaatggtgccatgagaatctgtccatacataaggttttaacaaaaggataattttgaaattacactattattactcgttatatatgatttttgaatgatataggaaacaaatgccaaaccattattggattggtccaggatgtgatggtaacccaaattccacactgtggaagcggttgattggattgacccgagaataaattaatcaagttttatttttaactaaatgatattttagtcccaaaattgaatgtatagattcgtaataatttagtcctgaatttattttgtatgttgttaatatattttttttcttttaaaaatttacataatgtaattgtataaattttatttttactttaatttttagtctttttaatcttattagattttttatgttattttagatttattatttagaataaaattaatattagtaaatattttaaattttcttaattaatttataaaattttcgtttaacgttttgtttttagttagtttatctgtaaattttattaagcacactcagcatataattttcctaagccttttttccattttcttaaataataatttatttttaaaaatctcgaaaaagcaacaagaacaaactatcattgtcaataaataaataaataaaggatttatttatttatttcacacgacaaataattttttcatagcttatatgcatccacaaacaaataaataaattttaatatagaatttacgattatagtccatatttatcataaatctcaattatataacagttcaaatttaattttactaaaccataaaaagaaaaagaaacaaaaaaatattttttatttataaaaattgaaaataatatcagaatttataacactaacatatcctatttttaactatctgtactactagactcctttaatcagagagtcactaaattgaagtaaacatagacaatcaaatgaatcagagatttgtcattttctttgaagcaatcaccttttctcatgcttattttcaccgcttcaaagctaccaccatggtggaaatcaacctcaacaaaggtgaaaacgaaaactccatgctcactcacaccccgcaacttgtttccccctctcattgcatctttattcttccaactacaagcaagcagccacatcattcgagcgtatagataaattgaagtagagttattctaatttaattagaaatcttaaatttaaatctttgatatgcaactaagttaaatactcgaaagaataattttgtcgtttatagtagtcttatatatctaagtcgaatcaaactaatcattactaaaaatctgttccacccttcatgaatctaaggttctttatagtaacatgcatacaaaagaagtaaaaccttcggaggaccaaacacaaagacagcacgtaacataagcatctagagagagagagagagagagagagagagagagttcacgagtgtaacaccgccaatttgcaactggaatcgaactactactactacttacatggcacatatccaactcatcagaaaataataccatcaaaaactcattttggttggtgacccttcacggggtggaaccattctggtctctttcttcacccaccaactccaaatcccgtggtccacgccgaaccacgtcaatccgaaccggagtttcggtgttgtctttctgcttttgctttttcttttttggaatgataataatgtgagagttcagcttgttgtttgggtgctgcaaaaacggttttcttttcgtcgtattttttttatcaagcaaaagggtcggtgtttgctatgagtgttggcccgggaatggatttgccgatcatgcatgacagtgatcgctatgagcttgtgcgtgacattggttctgggaatttcggtgtggccaggcttatgagggacaagcatactgaggaacttgttgctgttaagtatattgagagaggtgaaaaggtttgtcttcttaattcttgagcctttttttgggtacttgaaagtgcatatcaatcaacgaacatggtttgctttagcggaagaaactagtctatcagaatatgacaaaccaagtttcgaattcttgtttggggaaatgtcgacatttagtgttcaactgtatctcaaacataatttgaaaccgaaaaaataaaagtgcaaatcaatcaagtttatgcttgtatgtggaggaaagttgggaactgagtaattagtttgattctcaagggtgttataggcattttgatcagcttagtttctttgcaattgtttttcttagaatttatattttaagtgttatcattaaattaaattccatttcaaggagcacttgttttggttaactaagcttctttccttgtagttgctttcgtagaattcatgtttctggtggtggttgtatgaccttctcttgctagcatttcttttcctgctgtatgtctttcttgtctttggatggactttgtttccttgagaaaattacctgatgttgttgttcttttctggttactaacacatgatgattgaagcgtaagttttgtttgttatgttctctacttctcctcaatgttaaattgtagcaatggctgtgttggtaaaattgcaatggtaaacctgacgggagaatcatgcttatttgttaacagatagatgaaaatgtacaaagggaaatcataaatcacagatcactgaggcatcccaatattgtcaggttcaaggaggtgtgtagacttttaatgttttatcctatttcttcctatcttagaaatattgtttattacttttctgatgtgactttaggttatgttgacaccaacacatttggcaattgtgatggaatatgcttctggaggagagctatttgagagaatatgcaatgcagggagattcagtgaggatgaggttcttatctgttgcattcattcatttatgcaatgctgctgcatatgccttttatgtctgttgtcttttatgctgcaggcgcgtttcttcttccaacaacttatatcaggagttagctactgtcatgcaatggtacatgaattcaacgcatgtagtctttacttttaccagttatttgcttcccagaagaaagaaagcatgagatgtttgacttgaatttctatgtttttcttctttactgaagcaagtatgccatcgcgacttgaagttggaaaacacattgttggatggtagtcctgctcctcgtttgaagatttgtgattttggctattcaaaggtatagttcattcttgatattgctttttatttaatgagaccttcaggtatatagtatctgcattccaggttgtggcgctcaaatttcaactgggaattgtttagaaagtttatgaatttgtaggtttctccatgtccaagatcaagcaaattttttttatctgaaatttgtagataacggattagtttgcaatacctatgcaccttgattgtatttttcagtcttcagtgctacattcacaaccaaaatctacagttggtacccctgcatatatcgctccagaagttttgcttaagaaggaatatgatggcaaggtatgtaacttctatcacttggaattcatctaactgatgagactttgataatttctcattaagatgttctttattttgctcatgtgtttttatagattatgcttatgttcataagctcatatagacctttgtttccattttgcttatgactttcggtttacaagttggtatgtgagaccacaatgacatgtaattggctccactactttagacactctactagcttaagtaccaagagagttctagctactaggtgtatcttttgattataactttatgcatgtgtgtgttacacagatcaagaaaaattaataaataaattataaagagtagtaattgtacaaaattaaccttaaatcatcattaattcaattctagattttgtagttcatcattaatatataagtagaaaaaaataattaatgttacattgaaaaactaaaatgacaattattttggaatattttttttttacatgacaattataatgggacagaagaagtattatgtttcatttatgggtagtagaatgaaaggttgtgattactattatgcatgcatggtctagaattcagctagctttttatctgttgctctatactaatgttgacactcaattatgactcagattgcagatgtgtggtcttgtggggtgaccttatatgtcatgttggtgggtgcatatccttttgaggatccagaggaacctaaaaatttccgcaagacaatacatgtaactaattgcacctttttttcaatcaatgtggtactttgattgaattagttttcctaaactgatgcatgttggttgcagaggattttgaatgttcagtactcaattcctgactatgttcatatatcttccgagtgccgtcatctgatatcaaggatttttgttgctgatcctgcaaaggtcagtttatatatatatatatatatatatatatatatatatatatatatatatatatatatatatatttgctgaaacttacatgccttttaccttttattatactatttggagagttgaagtgaaaaggatgctaaatgagtttaaaannnnnnnnnnatatccttttgaggatccagaggaacctaaaaatttccgcaagacaatacatgtaactaattgcacctttttttcaatcaatgtggtactttgattgaattagttttcctaaactgatgcatgttggttgcagaggattttgaatgttcagtactcaattcctgactatgttcatatatcttccgagtgccgtcatctgatatcaaggatttttgttgctgatcctgcaaaggtcagtttatatatatatatatatatatatatatatatatatatatatatatatatatatatatatttgctgaaacttacatgccttttaccttttattatactatttggagagttgaagtgaaaaggatgctaaatgagtttaaaagacatacactattaatatataaaaattacactatcaactaactaaaaatcatttttgatataacttttaaagtagttattataaaagtcaacaaattttctatacacgacaatgcatataatctctttagactcaaatataagcaaaagtactaaataatttgaaagcagttaaaatttatttatacttgagtccaccgtatacttatttttgtatataattaagtctagaggttattcattctaatcatgtgcaattatactacttgcttctcctccttttatttgtgtgaaggatgatggcattgacatttaactttagaaactaatactgcttttaaaacagagaatatctattcctgagatcagaaaccatgagtggtttttgaagaaccttccaagtgatctcatggatgggaataccaacaacaaccagtttgaggagcctgatcaaccaatgcaaagcatagaagaaatcatgcagataattaaggaggcaacaattcctgcagctggatctcagtctctcaaccatgatcttactggtagcttggatattgatgatgacatggattcggatcctgaccttgacttagatagcagtggagaaattgtgtatgctatgtaagctggtggaagaccattgagcttaatttgggggtcaatattaatgttatgctctggattgcttagtgtgtgtggaattttccatatgctgggagagaattcatccagcatgtatttaagttgtatttgtgatcttacatgattacgtgcttctttgtataattgtattcatagttatgttatttttatataataccatacgcattggtcttctttggctttcccccttccctcaaaacttcatgtagtttttttttggatgatttaagtattgtggatggaaaaaattttgttgagagaaataaattttcacttcagtaatgtttacgttttgaaagaaattagtccataactattagttggaaaatatccttctattctatacacaagaaaaaaaataatgtttttcaatcaaaattcaagttttaactttataatctatatgcaaacatttattatgtaatttataaagtgaaacttaaactttaattgaagaacaacattaaaggaattgcatttaagctttgttctttgcttatagagtttcctttccatttttcaagacatatcaagtgagaatgtctgaaataaaaacatgatctaactttggataataaaatgacattgaggtaaaagttttgaaatgtaaaatgcacaaactctctagtggctagctttattcctttctgaaatatgaagattagctatctaaattctgcattgaatgataaaatctaattaaatgataaaatcatgtttgctgtgtgtatttatattttcctagataaaatgtatatttctccacaagagaatcatccaagataatgatgtcaattgatgggagaggacaaagagaagtataccaaccaatgtgttttgtgcaatgccccgtggaatcattctcataggcaatccgtgaaacctgactttctctcctaccaccacgaaacaaaaagggacacaatcaaaatttaaaagatagaaagcttgatctgctttctctccttctttttttgctttgggtccatgttctatgcctttgccattttagctgtagttgtcctggatgaaatcaagtggagtggagagagcctctcctctttttgtttgcattgtttatctagagtcttttttgatatgagaaaatgtttttcttttgtttagacttttttgtaagatgagtatgatggatgacaaagttattattccaattatttaatgtagttgttcttttattacttactttttctcttaattaaaaaaatgttatcttattaaatgtttgcataaaaaatgatgaattttttatattgtttttactatttcttataaatatatttaaaaataataaaggtagtttttctcaaaataaatgtgaaagtgaaaaaaaaaataaaaacttttttccaaaacaaataagtccttatgtcaatagatgtagataattctctgttaaaaaaaagatataaataattcaatataatgattcctaaattcgtaattttttttataaaaaccgggtcacattaattcattgataactatacaagtaggaacataatgataaactttgaatctagcatgagatattgctccccttgcaatagagtggatatcatcatttgcttgtctcttcaaaaaatgtatcctaaagtttagattctgcagaagtaactttctacattcagaaataatggagcatatctttttactatctatagcagtattatttttcttatctacaataaccttgcagtccatctccaaaatgacatgagttaagccaaaatcggctttagcaccgaaagggtattattttttttaattaccgtttgagggtataatttaaattttttaccaaaaagggataagtcataatccctattacacttctaatttaaaagttataacataaattacgacttatatattttttaattttcttcctggagtcgtaaaaaaaattatgacttcagtataaatatttttttaacccgtgacttaaaaaattttacgactttaaagtcgtaaaattttttgctgacgttcaaaactttttttataaagtcgtaaaactttttacggctttcaaatttttttttctttttttctttttctctttacgacttttaagactttttttcttttcttttttctttttctcnnnnnnnnnnnnnnnnnnnnnnnnnnnnnnnnnnnnnnnnnnnnnnnnnnnnnnnnnnnnnnnnnnnnnnnnnnnnnnnnnnnnnnnnnnnnnnnnnnnnnnnnnnnnnnnnnnnnnnnnnnnnnnnnnnnnnnnnnnnnnnnnnnnnnnnnnnnnnnnnnnnnnnnnnnnnnnnnnnnnnnnnnnnnnnnnnnnnnnnnnnnnnnnnnnnnnnnnnnnnnnnnnnnnnnnnnnnnnnnnnnnnnnnnnnnnnnnnnnnnnnnnnnnnnnnnnnnnnnnnnnnnnnnnnnnnnnnnnnnnnnnnnnnnnnnnnnnnnnnnnnnnnnnnnnnnnnnnnnnnnnnnnnnnnnnnnnnnnnnnnnnnnnnnnnnnnnnnnnnnnnnnnnnnnnnnnnnnnnnnnnnnnnnnnnnnnnnnnnnnnnnnnnnnnnnnnnnnnnnnnnnnnnnnnnnnnnnnnnnnnnnnnnnnnnnnnnnnnnnnnnnnnnnnnnnnnnnnnnnnnnnnnnnnnnnnnnnnnnnnnnnnnnnnnnnnnnnnnnnnnnnnnnnnnnnnnnnnnnnnnnnnnnnnnnnnnnnnnnnnnnnnnnnnnnnnnnnnnnnnnnnnnnnnnnnnnnnnnnnnnnnnnnnnnnnnnnnnnnnnnnnnnnnnnnnnnnnnnnnnnnnnnnnnnnnnnnnnnnnnnnnnnnnnnnnnnnnnnnnnnnnnnnnnnnnnnnnnnnnnnnnnnnnnnnnnnnnnnnnnnnnnnnnnnnnnnnnnnnnnnnnnnnnnnnnnnnnnnnnnnnnnnnnnnnnnnnnnnnnnnnnnnnnnnnnnnnnnnnnnnnnnnnnnnnnnnnnnnnnnnnnnnnnnnnnnnnnnnnnnnnnnnnnnnnnnnnnnnnnnnnnnnnnnnnnnnnnnnnnnnnnnnnnnnnnnnnnnnnnnnnnnnnnnnnnnnnnnnnnnnnnnnnnnnnnnnnnnnnnnnnnnnnnnnnnnnnnnnnnnnnnnnnnnnnnnnnnnnnnnnnnnnnnnnnnnnnnnnnnnnnnnnnnnnnnnnnnnnnnnnnnnnnnnnnnnnnnnnnnnnnnnnnnnnnnnnnnnnnnnnnnnnnnnnnnnnnnnnnnnnnnnnnnnnnnnnnnnnnnnnnnnnnnnnnnnnnnnnnnnnnnnnnnnnnnnnnnnnnnnnnnnnnnnnnnnnnnnnnnnnnnnnatgttacgacttctaaattagaagtcgtaatagggattacgacttactcatttttagtaaaaaatttaaattataccccaaacggtaattaaaaaaaaatgcaccctttcggtgctaaagccatccaaaatcaatcaaccatttaattgattcctaaattcgtatttgaaaaattatatataaacaagtttatgtgtcatgcattgaatataatttatgtttcctattaacattctttttttcttaatgcaactaacattcttttcttaagtgtattcttagctttattttgtagtatacgtttaggcatatacaagaatgctaataatcaatgtcattatacttatttatagttggtaatcaattgtattaatttactattttagtcgtgtcaatattttaaagaatccattatctttacttatccttgatcatgacaatgagagttgaaaggtgtgcttattcttaatttgattagtgaatttatttatttattttctactgttagtgtgtgaccgcaagattaacttgggtaaaagtgctgttgatgttgatgtattttctactgttagttagtactcagtaaagagtcctcttgagaagagcttaccataaatcatgatcctaatttctatgagaaacaagattacaaattcgaagtctaccactacattaagacttttctcccaatttaccaaacagaaaaaaaaaatatgaaaagaaatgtgattcaaaatgcataaggattggataacatgctgataaaaaaaaaaaaaggnnnnnnnnnnnnnnnnnnnnnnnnnnnnnnnnnnnnnnnnnnnnnnnnnnnnnnnnnnnnnnattgcttggagtttagaataaaagatgttctttgtgaggatatttaaattaggtaacacttgggctccatttattttttataaatgattttcctagtcaatcatgtttaaagattgatttcatggttaacaagtatgtaaatctagagaaaaataaatatcttttaattgatttggaatgatgttgaagatgtctgataccaacttttaaaaaaactatgtttgaaataatctattattactcaaaataatccgctattttattctaaattttttatatctttatgttcatccataataatgttattcgatacaaagattatactcccttcgtaaaatccaattacctaatttctcaaaattaaaaaaataattaatttagttaataacaataattttatcttaaatttataacctttttcaaattatcattctcaataatatttctctcttcttttctaattgtttatcagttttcttttaatgaaggaaatagtctaagaataattaatgtaaaaaatattataaattaaatcttataaaaaagaataaacattattttaatcttgagtcttataaatagaaatggaaggttcttaagcaagataatatgctatctannnnnnnnnnnnnnnnnnnnnnnnnnnnnnnnnnnnnnnnnnnnnnnnnnnnnnnnnnnnnnnnnnnnnnnnnnnnnnnnnnnnnnnnnnnnnnnnnnnnnnnnnnnnnnnnnnnnnnnnnnnnnnnnnnnnnnnnnnnnntttataacctttttcaaattatcattctcaataatatttctctcttcttttctaattgtttatagttttcttttaatgaaggaaatagtataagaacaattaatacaagaaatatttaaattaaatcttataaaaaagaagaaacattattttaatcttgagtcttataaatagaaatgaaagatgcttaagcaagataatatgctatctggaaaaaaattgctcaaaatactcatttttgtaaaaaaaaaaaacatttattttaattaattacttgttaattcaaacgtcatggttgactcgtgttaaatgaagtgaaggttcaatttgcttaaaattttgtataattgtgaaaataatatcataaaattcaacaattgaattgacattttatattctataaaaggttgttaaagagaataattatccaagagttaatcaaaaagtagattttgcttaacttattaaacttttaatttacattaaatttaattaatctaaatgttactttaagagtttaaattaaataaatgaagtatacatcatcagttatactgaatatctcgcaaaataatttctctttaaatagctttccgaaaattgtgtataaagattatttacaacgtagactacatacatgttatttacagcttaattaaagaatataacatgaatggctaaacacaacaaaatacaataacacgcttcactatcgatcaaaactggaaaggaatggagccagggaagcccttggtggagttaaacgattctcctcagatctcgggttcaaagcagaagcttgtggcatgagctcggataatcgaatcttttccttaataattttattctgtgtaaaagtgagcaaaatgttcttagcatttgatatagaaggcttcgtacacaaattactctactttgaacttaagagatgaaaacaagatgaaaaattagcttatgcttaagttaaaaattagcttctggaaaagctagaatgaaagcttctacagattaatttaagcataaagtgattttatgcttatggagaaacttattttattttctttcttcttattctctcctataaatacttgtgaagaagattatccaaagaggccctttatgtattatgtgcttaccttaaacttcaaatcttctctttccatttccagagtagttattctattcttgaggtcctgtagggcttcctcagccatagaaggagttacatctgatgttggtcttgctattccagccacctgaaaataaagcgtaaatgacgttttgtttaaccaaacccagactttgtttattgcattggacaggttggaacttcgaaggctaagaaccataaatcattgtcctaacctttagaacattagtggacaatctcagtaattgctgagctagttgtactttctcttcctcgatctcctgtggcattattcactcatgtatgtaaaatttacgtttaaatttagctacttaaaagcacaacacatcacagtacttatttggtaactgaccttcagctttatcatcagacgttgttcctcatcaaaattaatgcttgtttttgcgccagcagaagcacgaagacgcacaagctcttctttaacacgcgaatggaagatgtctgacttccggagctttgcgctgagttcttcgttctgtatctttaacttgttattttcctcctgttgcataattccacgatcagttatatattgaagatacattgccaactatgagcattgttatatcctctaataatttcttctaactgatatttttaatattttagaaatagaaaaaacatttaatcattgtttactaagaagattaataaaagatatttggaattattattattatttggattcaatatttttttttgctgatgtatttggattcaatatgtttgtcaatagtttgagatctagtgctgcgaaaataatttaggaactaggaaacaaaaacattggcttgaaccttgagtaaagcaaaatgatgacatattaccttaattttagcatggtgatgaatacgctgctgaaggttttgctgaccagacaactttttaatttcttcctccagttccactactttattcttcttacttgaattttcaatctgcacaaaatgaggacagcagcaaggctcgcaaattagaaatggaagaaaaataaaagaaccgcacaaaaaagagtgaagtttaatcatctaccttcagcatttcattttctgtttttagtaactggtctcgctgccgaaggtttgccaatgcaatttgtacagctaccaactccgcttgtttcctatctatttcttgcagccatctaacagatgtggattcagaatcataagaattgtttatataggaaaaaaagttaataacctccctgtttagcatctgacatttgattctcaaaccccaccccacctctcaaaataaatctgaaatttaattacccttgtctctcttcaatgaattcattcagctgcttctttagcttaataacctcctgttccagaaatgaacaagcaattcagcttaacttaagctccagcataataacagtgctatctagtccaaagtttagattaccttgtcttgagactccagagtaagaaatttaacgttctctgtaatctcctccgcttgctcatcaccaattagtgactgcattaaggaaatttattaaagatgagcatcagtgtgtgactagaactcaatactcttttgtataaaaaacatttttttacttccatttttatctcttcctttgttttatgggaatgattcccgtgtctaccatattttaattgcaagtgcataatttcctttcagaataatgataacatgaaagtttgatttttgtccatgtataccatacatgaaatatgaaaacaaaaagacattgcaaaagaaattgctaaaagtagacaagtttaccgcataagaggtcatatccaactttactccaagtaagtctcgaattacatcatgtgtcatgctctcagcagatgctaatttggcattcagtgcaaatatctggacaacgaaaaggaaggaacaaattgaggcccataaaagcaaaactaactactgtagaatattcaatttaagagaaagtcaacctctctctgtcgacatgctgcctgggcttctagttcttcaatgtgcagtcttgcagcagacagctcttcaaccttctcatattttacctgttgtgccaagcccaatcctatgcatttgaaaggagaactagaacctcgagacttggtggcattcttctcagacttgtttgacaatgcattgtgggaattagcactggtggaatgactagaaaggccctcaggtttgacttgctcagccatggcttccaatgctttaaactgatttaaaataacgacatacttaataataatagaactataaatagcctgtaaagaaactacgtgcatagttggtactgctgaactatatataaattataactaatagcgaccaagatcattttattttattcaatacaattactaactttctgcttgtactccatggcctgtgcttcagcatgcaaatttagctctgaaatatgagctttcatttgttgaatctgtcagagacagccaagaaaaaagatgaatctttatctgttacgagaaacttcaatccaagagacatgattagtaatgtttaaaaaatcctacctctgcatcctttcctgctaactccctcttaagaacctgtaggtgatttagggcttcattgaggcttttctctttttcatccaaaaatctacaggaattgaaatagaaacagaaaaatattttatatttatagattagcacggtagatctgcatatgcctatgataaagaagccatatatacaccaaaaaaaggcatatagttgggaataaaggtccaaaaccttctcatgtcaccatcgacatttctgacattttgcatctgatcttttaatgcatgtagctccaactctagatcttctctttgtagcctctgtcgttctgcttctcctttaaggatgtcaacctgaacaaaataattaaggaagggtgatacctatgaagatagacaagcttcttgtcaaatatcaccataaaaaaaagacaactcacttggttttctagtacatttacagtactttccagctcttcaactgatctcgctagaagtttcacctcttcttccctgtcttcagcataaatttttctcgactctgccacctgtaattattgtaacagatatcagacaggaacaaggaagaaaacaatcatccagctagttcaccattcttttcctttggcacatgaatgaaaacaaatgaaaaattatttttcaaagatcaaacatttaatgataggttatcaaaatcataattgtactgtatattttgcttcctttggcacatgaatctctatagaattctgattctcacagtttaactaaaattgcatttgaaattgtatagatgccagagttgagaaatgtgcaaaattttctatctctagaaaactgtacaaagttcaaatccaaaattgatatggctttctatgttatttgacattaaaattaaataatatatatatatatatatatatattgataagttagaactgttgaaaatacaactccttatgtcttatgttgaagatactacataacaaagttcttcatgttgagtcatggattattcaataataatgtcatggaggaaaacatgctacatttttaatagataaaagcattaccttctgagtttcttgagcaattgcttcattagcttcagcttgtgcttcagctttttcaagcctgtttttgaggcaaattacttgaccctgaagctgatccctctcattagtgacttcatccagatcactactcaggtttttaaatgaatcattcatttggctaaaaacactgttcatttccaggatttcatcttctaagctctctgttatcttcattctttctgttagctcattgtcagccagttttctcgctgccaaggcgccttcgatatgagttctaagttcttgattttcattgacttgcaaatttagagcctcacgttcttttgagagatccaactcaagagctgtaattatgtctgatttgtcctgcaactgagcttcaagcaattgacagtttgcaacaacatcagcaagttcacctgatttaacagctagctccgcttctaatgcctccattgtagccacaattttttcaacttcatctttttggtctttattgtttgatgcagattcctgtagtaagctcagatcatacaacagtccttttattacatcatcctttcttgataactcgacctccagtaagctctgcattctagttaactccgaatcctttaggttcagctcattcttaagtctgcaagatgaattttccaacatatagtttactttctttaactctgtgttttgatgttcgagaaaataaacctgttggaaagaaaattcagaagccacatccttctctatgacatcaccaattgcttcatcataatcagcttctagatcaagaatcccatccagcagtcttttctttgcctcgttagcttcaacaagttcacccttcaatgcattattagaacaagtaacatcctttagaaactcaatattttgttcaaggaccttgtttacttcatccatctctgtaatccttaagacattctggtttaattctgttaataggtccttcctttccacatttgcctgctgaacttctctttctaagagggaaacttcaacttccttatccatcaaaatttgttttgctaactcagtttctacttgggaaaagattgtttctttcttcagttgctcaattaatacggagtacttgacaaaatgctcctccatattagctatattacatgacatatttttcaattcagaagcatggataagtgattcaaagtctttggcaaaccaatctgccataaaaaattcagcctcacattcaatggcctctactttctgtttcagtagtttctcttgatctaaaagggatgtcacaatatctgtattactcacatccaattccctcatcagtttagcaagttgggatcccatttcatttgacctttgcagcatcatctcctcctgaagctgtaggtctgctatgtttttagcaaaattatttagcttgatggtgatctctccagcttcaacttctttcttattaatacgatcaaaactgttcttgatgtcagccagcagtttccctttcaagattctgcacatatcaagctcttgctttgtcctataattatgttccttcaaatcacttatgacagagttcgattcacacaagccgtgtgaaagcaaaccattttctgcatgcatccctgttactgtttccagtaaaatacccatgtgacagagatgtagcacagacatagcacaatctttaaaaactatctcagaccatatcttctcaagccatggctgtatcaatttagtggaatataaatattgagacttcaagcactctaaatcacaagctaaagacttgaaattttctgccatcgtcaattgaacgtctttaatgacatcatccaacgtaacaattagatcccttgtttctactagacttgattcaacaaggtcctctatctcctgatgcttcaaatcaataacagtttgtaagctttcaatattgctgactaatgtacccttctcattgagtaaagtcatttctctgtctttcagtctttcgatatcaatcttcattgactcattagctatcaccaatccattgatcataatatctgcttctctcatcgtatcttgtgcttcttcaaatttagcaagaatacaagatgcctcttgagctttctgagcttgaatgatctttgcctctccaacttcaagttcaagtgactgcaaagaaaaaagctttgtcttaatactactgttataaatgaaccaagcctaattgaacccccataagtattctagccatattcctagaagcattgtcttaacactactcagtcaacaagtgtctatcagcatcaatggggaatggggaaagctaatgacaacaagaaaaacatgtaaatgcacaatcaacactaagaatgacataaagcaaacacaaatttcttattttagagaatggaagagaggaaaaatgaaaacagaggttcaatgctgtacctctttcctttggtaccaatgggagctggcttctttcagaggtttctccaggcctctaagtttgtgactgagtacatcaatcttgactttagatttctcctcaaagtgatacatagcttcttgcaggaaaagtatctgatttgtgaggcactctatgctttgccgactcttcttttcagacactgacatctcttttttttcttcatgtaatctggccatctcatattgcacttcttttaagctttcaagagcacattcaatttcttttctcaaaagcctaatagtagcatctctttcaagcacatccttgccaacttttcctgatttcaggtctttcgtatcatatccacttttgaccaactgtaagtcagtcaggtcaactatatgttcttcaacagaaaggggatctgaatcactgttttgatgtgtttccgaacttgtctgctacaatgtcaaaatagcaaatactgaataaaaacaattcacagaccactgacatgcatcaaataaatgtgatattacctaaagtaatctatcagaaagcagcattagcttacccttggttcaccaatatcatcatagtctgatgtgcatgcatccaatgaatttctattttcaagacttcctggatggtctgcaaaagaggccatgcatgatctgattgaagagacaccatcttgtaatgtcgctagctgctcccttgtctttgaaatggcattcttttcaatatcttcaagcttttgttccaaagcacaagaatgttcacgctcctcagacagcttctgccataaatcattacatctttcctgcaactctgttatctgtctctctgcttgaacaaatgaagtggattggtcactgagaaggacatccttcctattattagtttctgctaattcactaagcagaatatccttatgctttagatcatccaggtaaccaagattcacttctgacaatctattcacaactacaaaagccactgctgcacaatttgatgcttttctgatatgatcttctgccattatcaaatgctctttcagttgtgccacagtagatgttttttcactgaattgtgaggtcaataggagaatttctttttcattttcagcacactccttctggtgggattcagtaatgactaacgctgcacttcttaaggacttcagcatacactccatatcacttcttttattgcttgcatcttccaaacatcttctaagttcatcaattaataattccttctcagaaatttttctaactatcatgccaacttgttcagaaatccagatccttttatgtggaaatgaattccttatattcccaagttcttcagaggcatcaactattgcctcacatccatcaagaagaacctcttcaatctcagaggttaacagttcccattcttcagccagtgatatgagttctatatctttctggccaagctcctcctttaaacttctattatcatcaatagtagtaagcattttttcctgcaaccccttcaattcagtttccagatgcagcacactctctttcatttctgtttccttcaaacgactgtcatttacttgatgctggagctgggcaagttcatcttgcatacagacaatcacctcaacagtttcagcctcggcctgccgacggatttcatctctctcttcctcagtggatatctggaatgcatgatcactttggtacaacatgttcagttgcttcgctttttcaagagaatcatgcatccttctgagttttacctgtaagggggacttgttttcaaactctggattatttgaaagcaaattatctctaaactctttagacacaagttggttcttcaacgtcatgatttcatgctcttgtttccccataagctccatataatggctgttcttgttcctcatctcttctatctctttgatagataatatttgctgcaattctaaagcttcaatgacagattttgcctctcccagctcgtcctttgcatcttctaattgtttgcttgtctgctcaagcttatcttttgccatcataaaatcctgatttaagcatgttttttgctcctccaatatgccacggaaagacctctcttccttcagaatgacctttattatatctaattccaactgcagatttaaaatatcatctgtgtgttgtgacagatgagtttcatgcttgacccccatccttggaactgcctgagcttcattaaatgatcctttggtagaaacctgaaaacaataatgacaaaaataaatattatttcacatgacacagaactatcatacataacaaggggtaaagaaacaataaatttgaagataaagaccataatgtgtatgaaataaggtccaactccaaaagaattcacatgattgagttcatcataagcctttccacacaaacaccattcacatgctcctcctcctatttatttgtacaatatagtaaaggacaaaacatagagatgttaaacaaggctacctttgtagtatttgtgctgcttaacattgagtgaagagagtctacttctctgtataaataagcaataaaaacattagaatttttacagccaaaatttggagctccaatctgcttgcatacaaccaaatggacttcaaaaggagtacaaaagtcatacctattgagttttgcattctcctctaagcaataatttaaattgcgcctgcattcctctaactcatcaagggtgtttcttagctgcaatccatgaacagaagcggtcacacatcactattttgagagggaaaaaaaaggttaaattattatgaaggaataaaacctctagatcaacagggttattttctttattgcagcactgggctttctgcaccagtagtaaatgaaactgttagaaatatattggatttgaaagtaagcatgaaagttgattactgctttaattaaggggctatttaagcagttgattgaatttcataccatactagtacaaatatatccctctgtaagtctggtttagaaacacaatttcatacattctgttttaacaggcaaaagggaatgtaatgttcaatggaatggaaatcatgaactgcttcaggtaattatagactaacctgaggttgaatgtcatgatttgaattaccctgcatggagtttcttccatgatattgaagcaactacagaacgaaggtaaatcatagaatcttaaaaaacaaggaatctaaatgggaaattatttctgtattaaattctagaaacacaattacctgttccctcaaagaagacacttcagtcaataaaatctctctctccccttcttcataaaactcttgatatctgtgcaagtaattgtaagaaactgcaaaaaagagataatatttcatagtcacagtcttggtaacaaacgatatatcaccttctaagttggtctagaagcctgatattctctacagcaaaccgagtgacttcaggatttcgatcaagtttgctctgaagtatttgaatctcatcagaaagtgctttattctcttcctgcaaaaatgtgtctgtaggaatggaaccagcaagttgggactccaatctacgaattttgtcttcacgaaacctaagcatcattttgcaactcctagtgtcctcctctctttgacgaacctgagtgacagcaaatttatggataaagagtgaacagagttgaaatataaaactccaatagcaagaagagctcataagagaaataccaaacgatttaattgttcaatttcagcttgtagttgcttaatagaaatttctgccatttgttcccttctcaaagcacccgcaagagttgtctccaatgaatgtaactgagacacaaatgattttgaatatataaatatttgacggaaaaacactatatggtcacttcatggagatactaacaattatataacttgcttttaggagactagttgtagattatgttagtatagccacaagcaggccagtacacaagaatttcaccatcaggggatattgggagggccaaatttacattgtatcactataagagagaggtttttttccgcagcgaaaacttgggacaaatcaaaaggcattgcattaccattccactaaggctcaccctcccatagaaactaaaagcataatcacaacttcttattttacttaggacatcgatctcttataaaacaaatgattaattacaaaggagaagtctttaattttatatatcttgaagcaacaaggcatgaaaacaatagaaacattggttcaaccttcaaacataaattgtcattacactggccttcattagcatagccaagcctacccatgtatacctgtttgtgggacattctgatgcccttggattcataatccggcatgttatcttcatgttggtcaaccatgtcagttgcattttctaggcaacagtcttctagttctagtgattgttttatatctctgatcgatgacaaagaaaatgacaaagacctagagacattctgacgccgtttgaggatagaaagctcttcctggcccaaaaatttatcatttgagttaaattatcaactcacacaaaacttatactacaagaaataactgataccaccttcaaaagccgaatttgatgttttaaagcaattacatccccagtagaatcttcgttcaccacagcctacaagaacaatatggaatgtatagtgataggttgatgagattcattcctttgaaagcaattcagactgatcatagaatggcactcacattattttgaataagttttgctctctgagcaaatttaagtgtattcaatgtttcagcagcacagctgcaaaagtgaaacgggtaaagctccatcaagcttctattgtaacctgaaaagttttgataaaggaaatatagttccacataaataaacaaaccagatagaagggctgacattggcaatgatcattgttttcgagtttccgccaagagagtcctgcattttatgccaaatagtgatgaataaaagaaccctgagactaaagttcaaactaaaccagcatatatatcaacctgaagaagaaaagttagtctggagtctctgtaagggatatgcctctgcttcccatttgccacatccactagtatcataataacatgactgcaagaatgattagagaatactagttactcaatgagaaagcagaaataagacaattcaaaatcttaatgtattaagctaaaatgttaaaataccccaaggtagataatgatttattgatgttagctgcttcttttaaacgctccccctcagcaccagaagtcttctgtctgttagatatatgataatgataacttggctaatacatgcatatacatatttcaatttcccagctacacttagttcaatcaactctaaaagctgatgacatacctttctgagccagccagatcaaccaggtttaaccttgcaaaacgataattagttgtagaatccttttcccatgtgctctcaattacacatgtaaaaacactatgggacctactgctctctctattcatatttgttgctgcaacttttctattagcagaaccctacatgtcagaaactacaacttaatggaagaaagtgcatttcagagaaaatatatgtgttcatttaaataacatacaaagagttgtttgggtattcctcaaaatgaaaaggatggtcccatagactagtacctgaattagaagccttataatgtcactcacactttgaacctcgaactcggataaattttcaacataaacacccttcttgacatcctcacgcagctatttttaaaagaaaaattataggagcattgagaaataattaaaaatgctttgacagacatctgatgattgaactacacttactagcaaattagtagaggagggatcaagtagatctgtaatttgttcattgtaaatctccaagaaggaacacttgcagttgtattttaagttctcatctcttcggctttcctcttcctggaatttggattaatgatcaatattgattataaaaaccagcttctaatatataaaaaaactaaattagccacaattgatgaatttacagcttggatcctggcaaacaaaaactcaaatatacgcggtgtcattccacgatgaggactaggcatcacatctaaatcttcaatgtcaccaagcattgtatatgttttcccgcttcctgtctgcaaaattaacagactcattcatcatcttacagttaaaaaaatgtcactgtccatttctaattatgttatacaacaccagagcatacattctctcaacagctgacattgattttacatctaacagctttgtgatgaatgatccagatattgcacaaagagctaaaatgctgcataaaaaaaactgaaaaaaaatctaagctgtgataggcttttatgatccctaattcatagaactgcacgtgatcctactgacataaatcgatatgtcagtgacaaacactcctaatttatgatgcaggataacttattagagttaatgcagcatcacttttggtaatgacaaaactaaagagttagtccaacaaacactgatgtagattacaaatgacatcacaaattcctttttttaatttcaaatcaaaacaatatccaatccaataagcattacattggaacctgtgcataaattctgttgtttctctacatgctaacaaatgcctaaatctttctttcttataaggaccaattaacagaaaagatagacataatctcaaaaagcggctaagttcaagatattacctgtccatacgcaaacatacagctattataccctgaaaggcagttctctaccattggaagaccagccaatctgaaaatcatttcctacaaaaccataaaccagagacagaaatcaacaactccatcccatgaatttagcacctcaaaaaaatattttcgatgtaaccacacctggtcaatggtttcacatgcaacatggtcaaagttgaaccggttctctggttgcccaatccaagtaatgctctgagagccttcttgcttcaggcatctgttatacccttgtgtacatcgctccatgctattcagaggacgaacacgaataataacctacacataacaaaaaattcataccacaaatcacgataagcaccagaaattcaacaaacattctcatccaaatcaaatcagctgaattggagacacaatctggatcactcacctgtacattgtggttaatccaaaacgaagaatcttccttgagatcaaagtgaggcacttcgaccgtgttaacaaccgtgggcgtggagcaagccgaactgggaacccctttatacaatgcagcatagttccccaagcgggcactgaagcctcctccatctgccttgctccgaacgctcgagccaggaggtggctttgtcacactcttagtcggagtgctctgcgtggagttgctctcagaataggcagtaacactcgaagaagctctccccacagtgcgaggcacgcgaggagtcacattcccaacaccagatgctctcctatcatcaccgaacgacgaaactcctccgtcgttcttgtgattccaaccaaaccggtgcttcacaatcatcacgccgtgcttatccggcgtgcgaagctcagctcctcctcttcctctcttcgaaggagtcttctcaatcttgctttcgcaatgcgcatcgggttcttgaattgtgttcaacggaggtctagaaccttccgcgtgcctctgaactgtggtggatgaatcataaggatctacattttcaggttcttcgtgcttgctagggtttcggcgccggagcttgaaatccctcagcattctacagcatgcatggaaaatgaaaatgaaaaaatcacgaatgacgcaaaattaattaatgaaaatgagtttcgaatcgcacggaagttgtgagtttcagtttcggtacctgaaggagttgttgcagaacaagattccgaagcgacgaatttgaagagtggtgaattttactttggtttttgttgcgttgcttcaatctgagttagggatttgaggttgaactggaacgttcaatttcaacatagatagatccacactcactctctcactctcacgctcgctctcgctctgttgttgttgctgtgaggagtttttttatttgaaaaaaatcgaagttgaaaaaatggatgtaaggaaaagggtgtttgatgtgaacggctgagatttgatctagaattcaaaaatgtataaaagttgacgtaatcgcggttttgggatttgaaatgccggggtgttttggtcatcccacgtgggtccttaattacaacaaggattcaaaatttcaacggctaaatgcttatggtttctacgtagttacgttaggtccattactatcgattatcgaatgacatctggtcattcaatgttgggtccattatttttgctgttttctacatttttgttgcatggacatgggcaagataggttcgatgaattatcatagagtaaatcagtactatgatcataacaagtgtaacatgctagtacttgaatataagaaaactttaaataagttttttttttgaaatttctagttgatttattttagtcttgaaattcaattacttacaattattttggtttttaaacatatatttaatattaatacttaggattatattaaattaggattttaaaagactattttaacattaaaaagttttataaattttaaagattatgtaagaatattatgatttatcagatttttttataagatttttacgaattttaataaatttatatcataagatataaaggatttgaaagaattttatagatttataagatttgaaagaattttataaaaaaattaaaaaatgcattcaaaattgagatatatcttggattcaaattattttgttctagaattttcttgttttttctttcctttttaagtttgaattttccccccttataatcaacttgagttatgcatattcaatgcatcttcgaatagcatttcattttgtgcatatcttttgagttagccattaataacatatcattcttccatgtgattctttaggacataacgcatcactgaaattaacatatcattctttcaagtttcatctgtcatttctttaggacaaggcaatatacacacgtgtctaccactgtgatatgcatttacactcccatacagttttaggtactctacgtatatactagtgtctacacgtattgctgcaggaagttgaagaaaccagtctattgatcacttaattttttttagaataagaaatagacatctgatttcatattatgataaattggtaaattgggaatgttacattaagtcatgataacaaaatatcctaatataatgcacattaatgcataatttcaatttcgactacatgtgaaatgatgttatgttccccttatcaggagcagtttggagaaattcctcattgcattggcatctactattgaagtgttagatgaaataatggagctagaagatataaaactaaagaccatgttggagtcctatggacaaatggatttggccagaaagggccctttccgagccttacaaatagtttctatactcatatttaccctaaagaatctgattgactagcatgagaaagatgaatcaaaagacaaaaatgattgtaggcaacttgtgctgatacagctgacattagccgctgcattcattttcatgggccgttttgttgaaagatgccagaagtatagtcctttgaatcattgccccttattgccttctgtactagtttttgtggagtggtgtgcaagcatgcttgataccattgaagtatatgcaactgatcaaaagtgtgaaacagctatttcttactttatttatgtgcttattgaacttctaaatcaactaaatgagaatagaaaggaaaccaggaagcttgtagatagtggtacccctctttgggaagactgagttgaggggctttgtatctatagctttttctcatgtctcactagatttctcttgtagatgggaacacatcaacaactttgagagtgacactgaattgcacactcagcgcatgagtgaagcagcaatgaggattgctaacagatctaataatttgcaaaagtggattatatgtgatgaattaggaagaaaatattactttgctagatctgatgaaaatcacgagaagaaagaatcaggtaacgtagagtccactgacaaaaggacaagtggggatgaccctaatcagaaaactcacaaagacaatggagaagatggaaaatgtgatacaagggataatccaagtagttccagcactaatggaaaaccttctgttatggaggaagaataagttattctcttcaggcctctagcgaggtataattcagcaccattgtaggcactttttccccttcatgagcagatgtcatcaccaaaagacaaggatgataaagtcttgccttctgattgtctgcgccgtactacatctctgcctatggcacaaaatccatttcaaattgatccgtggggattccaaggtgacattaataattcaaggatgaacaaatcgttccaactgcaagaacattcaatgaaggaatcaaatgcacacatattttctgagggtccaatctctgctgggcatctttcactcaatgcatgggtccttgatggatgagggttgagcaccaataggttgcaccccattgaggaactagcttcttcgtacttggccgatttttccatcaatagaactcagaatccagtcatcagttcagcagatgagtttccaaacttcccttcctcatctgctacatatactgttccagttccttctgctccactgttgccagataatgcttcttggtacaccgatgtcattgtacaatctactgtgtcttctccatcattgccagaaaatccatcaccgataaatggttattcagctttgagttctacttatggaccccttggatatgatactagttttccatcttattccaatggatacacaccgccaccaggtagaataacttcttcagaatggctgcgttggtacagagagaatccaacacctgagagggtcaacaataatatgcagcctactcatttgaacgttcatggaaatcatgaaaacttcctccatcatgacacctacaggttcaaccaatttgatcaatggggtaatccttcgtctcctaaccagtacatatatgtgaagccaccaggtcccccaccattgctgccaggttattatccctatgcttttggtgatggtgaacacataaccaatcacttccacatatttcaaagaccaagcccttatgggtgtggttctgtgacagaacagagaaatgagccactgcctctgctagagtaccttatggaaagggaatggagactccagcaggatcctatcctcagaggggcctacattcatgggaaattaaaactcccctgatctaaaaattttgtttcatcattacaaaattgtacgccttacttgcactttgattccttacagtacaagtatcaaatatgtatatatttatataatgtgaatagtgttttaaccattccatgaaagagtaatttcaaagaaagtggatgaaatatcttccattctacccttgtctagctggtttaagcataatcttcatggtgcacagtttgtgcagaagtgatgaggaagcgtaaatacttgcccctagggtacgcgattagtgaaaacaggccttctaatgatgatagctgatataataactagtaaaaaaaatatatgcagtgattgaaaacattaaatttgtgaaccaccaacacatattggatctaagggataaagtttttgattcgttaaggtttcagattattaatggaatgaaaaaatagacatggacggaactttacttagaaattgacgtacaaaaggtcgcaagtctaaaaacaaatggtagagctttgtagtcgcaaacactacaaatttccgagttgtcggtattaacaggcatattacattcaaaatcagtttcatataaaaacattatcattgcaatcctaatgatagcggtaaaaagaattctctgtcgtgaaggaaacataaactcttgacaatgactcatttccattgcaagcatacaaactttgatgaattcaaccacacaaggtgaaagaacaaaattcccagacccaaaaaagaaaaagaaaaaaaaatagtcttcatcgaaagtcctacgaagtaaacaaagacagaaacactaaccccactatcagaaccatgtctaactcttgacaagtttgctagaattttgtctgttatatatttaaatcttggcattttctcatgtttaaccaaacgcaactttatgaatgatattttttttattctcttgttacaattcataccacccaaaaattgtctaacatctttatttgcttgaaagttgaaaattgatgttgagttgatattattagtattttttgtaacttcataagtctggttttaccattccatccccccaacaagtccagtggaggaaaatccatttcccctgtcatgatggtgcattggtatgatgggtctatccatcatcactcctctttctcttctcaatttgatattgtgtaattgggtaatatttatgtcattggtcaatattacccctggccaaggcataaagtgtgttacaatctacacttaagaatgctctattgaaggtctcacatactgttgatttgctggtcactttgaatatgattactgtttacgaatcatctagtccatattaaatgtggcatttcatcatatcctttcaggttttagcctattacaacataaaaaacattctaaatatatattctaaaacattatttaaatatttaataaggactaaaatttatagattttagaaaagtaccagcttactaaacaattggtaactaaaaataattaatagccatagatatttttttagcactgttattgttaaaaataataactacaactacaaagtgaaactcacgagagtaaaataagcaatctcagttattgagaaaataataaatttgatattacatattcgtttacactcacatacataccaaatcatgaaattatgatgttaaaacatcaaccgataagtttcaacaatgattaaaattacttaattcaatctaaactctaaatcatttgacgagtcagtacaataaaaaaaaactagtaacacacaaattgagaagagaaagaggagtgatgatggatggacccacataccaatgcacatacnnnnnnnnnnnnnnnnnnnnnnnnnnnnnnnnnnnnnggggggggggggggggggttaaaaccagacttatgaaattacaaaatactaacaatatcaatatttccactttcaagcaaataaagatgttagacaatttttgggtggtatgaattgtaacaagagaataaaaaagatatcaaatacataaagttgggtttggtaaaacatgagaaaatgtcaagatttaaatatataacatacaaaattctagcacccagaagtacatttccccctgtttacaataaatttctcaaatatgctgccatgagtgtaatgcttaaacaattgtgttacatgggaagcagattaattgctacaaaattctacctgaggaatcatatctagatctaaagaattcaagcttagaacatgataactcaagccatttttggtccaactataaatataataaaggaaaaaagctatgcccctagtttacaaatccaagactgtaagtgacaatcacaacactgtcaatcaacacagcaaggaataaagtgcatataacattatacagttatcatcaaaagcaacaagagcaatcaaatgggcagagaggcgtatttccagcatctgcattactaatacctaactcctcttcggtgtagacggtaagtccatcctctgttttctttcttggtcgagaaggccggtctacaaactcgccatcatctgactgattcctcttcacattcttctttttcttcttcgttttgtcagtctttttagttacttcaccaggctttccagtcttttgcatctcagatttcttcctcttcttcccagcagcaaatatttcatcaatttctttacttgcttttttgggtgtagatgaagatctctcctcttctgcaacaatattctcttgtaactgacttggtgtctttttagaactcttcttcgtcattggagcgaaaagaaagctgcatatcatgttacaacctttgtgagtactgaaatattcaacaaacagaaagaagaaaaacacttgtagaaagaagattaagaccagctggctaagatttaaaaacacagtagctaggtccagcattttttcatttcagatttagattctctcattttggatattcagaaaagggcaaaaaatgtctggatacattttatgccatctatctgaaagcttacaatacaaagaagaaaataaagaacctaactaaaacccgcaatatcagaaaagtaagaagagtaatacaaaatgaaaattgcagagaaagtgaaatgattacagcttcaggtcgtcatcgatttctagcttcttcttgcacccagtggtggcatttgcaatgttgaacttcagtaaaatcgaacatgtttcagcgacaaacacacaaaaatccaaacacggaagcaattagggttcagagacaacaccttcatttgcaatctcgtgatgatcccgctgtgcctaaactcgctgcgtgacagcgtgagtttggaaactataataacatacggtaaactcagtaacgacaaaaagggatagggttttacatgttttgggcttttatgctcacttttgcttcatgtgcaccccattgaaaacttcaatagacaaaaaaaaataaaaattcattgggctaatgtaaaactcattgagtgaattaatttgttgggcaaatttgggacaaagaaaagggtgaccctatgtgagtatttcattgggcgaatgtaaattttgttagaggaattccaggcctcactggtcaaatttaatgaccaaattaacctttaggggtaagggacaagagtggggtatatgcatcttgtgaatgtgcgtatgagggtgctaaatagtaattaagaggtgtcaatagttagaccatcccacccatgtaggttgagatgacgaatccaactgacccaaatccatctgttacacacctaactttgactttaaattctcttgtgaataatataaaaatgcattttttcctaaatcaactaatgataaaattttcgaattgcttgaaataatttttaatacttcagaagtattatgtatgatacatgatttatatagttatttttcttatttaaaatgatttaggattaaatagaagaagaaaaaaaaagaacactaactcttaaaaaaacttaatcatgggaaacaatgacaatataagaagatttagaataactctttaagaaattaagcaacacgttatataaaaaaattaaacaacataaatgcagtgaaattttgctagttcgtagttattggtgtgtaaaataggtgaaaatgagttttactcattcttcatagaactttcaactactagaatttctttttttatacaatgaacatgtttaactacaatcaaatataaataagtcaaaattgagtttaattgagttgagacatggagtgactaagataataatacaatcagatagtattaattattgtattatttaaatttcaaacgtaggtaaataattttttcgagacacaaatataggtcaatataattttttatatatatgagatgaaaaatggcattgagaacttgaggtagaacaatcaattaagaaaagatgggtaaatgaaaaaataataatttttaaaaaactttggcttaaataatttgtttactacatgtaaaataagtcattttaattttactacccaaattaccacttttttatattttagtactctacattttttttttatgttcaattttagnnnnnnnnnnnnnnnnnnnnnnnnnnnnnnnnnnnnnnnnnnnnnnnnnnnnnnnnnnnnnnnnnnnnnnnnnnnnnnnnnnnnnnnnnnnnnnnnnnnnnnnnnnnnnnnnnnnnnnnnnnnnnnnnnnnnnnnnnnnnnnnnnnnnnnnnnnnnnnnnnnnnnnnnnnnnnnnnnnnnnnnnnnnnnnnnnnnnnnnnnnnnnnnnnnnnnnnnnnnnnnnnnnnnnnnnnnnnnnnnnnnnnnnnnnnnnnnnnnnnnnnnnnnnnnnnnnnnnnnnnnnnnnnnnnnnnnnnnnnnnnnnnnnnnnnnnnnnnnnnnnnnnnnnnnnnnnnnnnnnnnnnnnnnnnnnnnnnnnnnnnnnnnnnnnnnnnnnnnnnnnnnnnnnnnnnnnnnnnnnnnnnnnnnnnnnnnnnnnnnnnnnnnnnnnnnnnnnnnnnnnnnnnnnnnnnnnnnnnnnnnnnnnnnnnnnnnnnnnnnnnnnnnnnnnnnnnnnnnnnnnnnnnnnnnnnnnnnnnnnnnnnnnnnnnnnnnnnnnnnnnnnnnnnnnnnnnnnnnnnnnnnnnnnnnnnnnnnnnnnnnnnnnnnnnnnnnnnnnnnnnnnnnnnnnnnnnnnnnnnnnnnnnnnnnnnnnnnnnnnnnnnnnnnnnnnnnnnnnnnnnnnnnnnnnnnnnnnnnnnnnnnnnnnnnnnnnnnnnnnnnnnnnnnnnnnnnnnnnnnnnnnnnnnnnnnnnnnnnnnnnnnnnnnnnnnnnnnnnnnnnnnnnnnnnnnnnnnnnnnnnnnnnnnnnnnnnnnnnnnnnnnnnnnnnnnnnnnnnnnnnnnnnnnnnnnnnnnnnnnnnnnnnnnnnnnnnnnnnnnnnnnnnnnnnnnnnnnnnnnnnnnnnnnnnnnnnnnnnnnnnnnnnnnnnnnnnnnnnnnnnnnnnnnnnnnnnnnnnnnnnnnnnnnnnnnnnnnnnnnnnnnnnnnnnnnnnnnnnnnnnnnnnnnnnnnnnnnnnnnnnnnnnnnnnnnnnnnnnnnnnnnnnnnnnnnnnnnnnnnnnnnnnnnnnnnnnnnnnnnnnnnnnnnnnnnnnnnnnnnnnnnnnnnnnnnnnnnnnnnnnnnnnnnnnnnnnnnnnnnnnnnnnnnnnnnnnnnnnnnnnnnnnnnnnnnnnnnnnnnnnnnnnnnnnnnnnnnnnnnnnnnnnnnnnnnnnnnnnnnnnnnnnnnnnnnnnnnnnnnnnnnnnnnnnnnnnnnnnnnnnnnnnnnnnnnnnnnnnnnnnnnnnnnnnnnnnnnnnnnnnnnnnnnnnnnnnnnnnnnnnnnnnnnnnnnnnnnnnnnnnnnnnnnnnnnnnnnnnnnnnnnnnnnnnnnnnnnnnnnnnnnnnnnnnnnnnnnnnnnnnnnnnnnnnnnnnnnnnnnnnnnnnnnnnnnnnnnnnnnnnnnnnnnnnnnnnnnnnnnnnnnnnnnnnnnnnnnnnnnnnnnnnnnnnnnnnnnnnnnnnnnnnnnnnnnnnnnnnnnnnnnnnnnnnnnnnnnnnnnnnnnnnnnnnnnnnnnnnnnnnnnnnnnnnnnnnnnnnnnnnnnnnnnnnnnnnnnnnnnnnnnnnnnnnnnnnnnnnnnnnnnnnnnnnnnnnnnnnnnnnnnnnnnnnnnnnnnnnnnnnnnnnnnnnnnnnnnnnnnnnnnnnnnnnnnnnnnnnnnnnnnnnnnnnnnnnnnnnnnnnnnnnnnnnnnnnnnnnnnnnnnnnnnnnnnnnnnnnnnnnnnnnnnnnnnnnnnnnnnnnnnnnnnnnnnnnnnnnnnnnnnnnnnnnnnnnnnnnnnnnnnnnnnnnnnnnnnnnnnnnnnnnnnnnnnnnnnnnnnnnnnnnnnnnnnnnnnnnnnnnnnnnnnnnnnnnnnnnnnnnnnnnnnnnnnnnnnnnnnnnnnnnnnnnnnnnnnnnnnnnnnnnnnnnnnnnnnnnnnnnnnnnnnnnnnnnnnnnnnnnnnnnnnnnnnnnnnnnnnnnnnnnnnnnnnnnnnnnnnnnnnnnnnnnnnnnnnnnnnnnnnnnnnnnnnnnnnnnnnnnnnnnnnnnnnnnnnnnnnnnnnnnnnnnnnnnnnnnnnnnnnnnnnnnnnnnnnnnnnnnnnnnnnnnnnnnnnnnnnnnnnnnnnnnnnnnnnnnnnnnnnnnnnnnnnnnnnnnnnnnnnnnnnnnnnnnnnnnnnnnnnnnnnnnnnnnnnnnnnnnnnnnnnnnnnnnnnnnnnnnnnnnnnnnnnnnnnnnnnnnnnnnnnnnnnnnnnnnnnnnnnnnnnnnnnnnnnnnnnnnnnnnnnnnnnnnnnnnnnnnnnnnnnnnnnnnnnnnnnnnnnnnnnnnnnnnnnnnnnnnnnnnnnnnnnnnnnnnnnnnnnnnnnnnnnnnnnnnnnnnnnnnnnnnnnnnnnnnnnnnnnnnnnnnnnnnnnnnnnnnnnnnnnnnnnnnnnnnnnnnnnnnnnnnnnnnnnnnnnnnnnnnnnnnnnnnnnnnnnnnnnnnnnnnnnnnnnnnnnnnnnnnnnnnnnnnnnnnnnnnnnnnnnnnnnnnnnnnnnnnnnnnnnnnnnnnnnnnnnnnnnnnnnnnnnnnnnnnnnnnnnnnnnnnnnnnnnnnnnnnnnnnnnnnnnnnnnnnnnnnnnnnnnnnnnnnnnnnnnnnnnnnnnnnnnnnnnnnnnnnnnnnnnnnnnnnnnnnnnnnnnnnnnnnnnnnnnnnnnnnnnnnnnnnnnnnnnnnnnnnnnnnnnnnnnnnnnnnnnnnnnnnnnnnnnnnnnnnnnnnnnnnnnnnnnnnnnnnnnnnnnnnnnnnnnnnnnnnnnnnnnnnnnnnnnnnnnnnnnnnnnnnnnnnnnnnnnnnnnnnnnnnnnnnnnnnnnnnnnnnnnnnnnnnnnnnnnnnnnnnnnnnnnnnnnnnnnnnnnnnnnnnnnnnnnnnnnnnnnnnnnnnnnnnnnnnnnnnnnnnnnnnnnnnnnnnnnnnnnnnnnnnnnnnnnnnnnnnnnnnnnnnnnnnnnnnnnnnnnnnnnnnnnnnnnnnnnnnnnnnnnnnnnnnnnnnnnnnnnnnnnnnnnnnnnnnnnnnnnnnnnnnnnnnnnnnnnnnnnnnnnnnnnnnnnnnnnnnnnnnnnnnnnnnnnnnnnnnnnnnnnnnnnnnnnnnnnnnnnnnnnnnnnnnnnnnnnnnnnnnnnnnnnnnnnnnnnnnnnnnnnnnnnnnnnnnnnnnnnnnnnnnnnnnnnnnnnnnnnnnnnnnnnnnnnnnnnnnnnnnnnnnnnnnnnnnnnnnnnnnnnnnnnnnnnnnnnnnnnnnnnnnnnnnnnnnnnnnnnnnnnnnnnnnnnnnnnnnnnnnnnnnnnnnnnnnnnnnnnnnnnnnnnnnnnnnnnnnnnnnnnnnnnnnnnnnnnnnnnnnnnnnnnnnnnnnnnnnnnnnnnnnnnnnnnnnnnnnnnnnnnnnnnnnnnnnnnnnnnnnnnnnnnnnnnnnnnnnnnnnnnnnnnnnnnnnnnnnnnnnnnnnnnnnnnnnnnnnnnnnnnnnnnnnnnnnnnnnnnnnnnnnnnnnnnnnnnnnnnnnnnnnnnnnnnnnnnnnnnnnnnnnnnnnnnnnnnnnnnnnnnnnnnnnnnnnnnnnnnnnnnnnnnnnnnnnnnnnnnnnnnnnnnnnnnnnnnnnnnnnnnnnnnnnnnnnnnnnnnnnnnnnnnnnnnnnnnnnnnnnnnnnnnnnnnnnnnnnnnnnnnnnnnnnnnnnnnnnnnnnnnnnnnnnnnnnnnnnnnnnnnnnnnnnnnnnnnnnnnnnnnnnnnnnnnnnnnnnnnnnnnnnnnnnnnnnnnnnnnnnnnnnnnnnnnnnnnnnnnnnnnnnnnnnnnnnnnnnnnnnnnnnnnnnnnnnnnnnnnnnnnnnnnnnnnnnnnnnnnnnnnnnnnnnnnnnnnnnnnnnnnnnnnnnnnnnnnnnnnnnnnnnnnnnnnnnnnnnnnnnnnnnnnnnnnnnnnnnnnnnnnnnnnnnnnnnnnnnnnnnnnnnnnnnnnnnnnnnnnnnnnnnnnnnnnnnnnnnnnnnnnnnnnnnnnnnnnnnnnnnnnnnnnnnnnnnnnnnnnnnnnnnnnnnnnnnnnnnnnnnnnnnnnnnnnnnnnnnnnnnnnnnnnnnnnnnnnnnnnnnnnnnnnnnnnnnnnnnnnnnnnnnnnnnnnnnnnnnnnnnnnnnnnnnnnnnnnnnnnnnnnnnnnnnnnnnnnnnnnnnnnnnnnnnnnnnnnnnnnnnnnnnnnnnnnnnnnnnnnnnnnnnnnnnnnnnnnnnnnnnnnnnnnnnnnnnnnnnnnnnnnnnnnnnnnnnnnnnnnnnnnnnnnnnnnnnnnnnnnnnnnnnnnnnnnnnnnnnnnnnnnnnnnnnnnnnnnnnnnnnnnnnnnnnnnnnnnnnnnnnnnnnnnnnnnnnnnnnnnnnnnnnnnnnnnnnnnnnnnnnnnnnnnnnnnnnnnnnnnnnnnnnnnnnnnnnnnnnnnnnnnnnnnnnnnnnnnnnnnnnnnnnnnnnnnnnnnnnnnnnnnnnnnnnnnnnnnnnnnnnnnnnnnnnnnnnnnnnnnnnnnnnnnnnnnnnnnnnnnnnnnnnnnnnnnnnnnnnnnnnnnnnnnnnnnnnnnnnnnnnnnnnnnnnnnnnnnnnnnnnnnnnnnnnnnnnnnnnnnnnnnnnnnnnnnnnnnnnnnnnnnnnnnnnnnnnnnnnnnnnnnnnnnnnnnnnnnnnnnnnnnnnnnnnnnnnnnnnnnnnnnnnnnnnnnnnnnnnnnnnnnnnnnnnnnnnnnnnnnnnnnnnnnnnnnnnnnnnnnnnnnnnnnnnnnnnnnnnnnnnnnnnnnnnnnnnnnnnnnnnnnnnnnnnnnnnnnnnnnnnnnnnnnnnnnnnnnnnnnnnnnnnnnnnnnnnnnnnnnnnnnnnnnnnnnnnnnnnnnnnnnnnnnnnnnnnnnnnnnnnnnnnnnnnnnnnnnnnnnnnnnnnnnnnnnnnnnnnnnnnnnnnnnnnnnnnnnnnnnnnnnnnnnnnnnnnnnnnnnnnnnnnnnnnnnnnnnnnnnnnnnnnnnnnnnnnnnnnnnnnnnnnnnnnnnnnnnnnnnnnnnnnnnnnnnnnnnnnnnnnnnnnnnnnnnnnnnnnnnnnnnnnnnnnnnnnnagatattaaaaaaattattttttacaaaaaaaatgcaataccctaataaaaaaaaattgacacccagatgcaataatatctgttttcatagtaataataataatattagaaaggaaaatagtataaatcggataattatattgttcacaacaataatatgaataatattttagatccactaactattactaaattacttgctgaaatactaaatatattaacattatcatacatatagtctcatttaaataacatttttaatactataataaccttaattataagcagcacgtgtaaatcaaggacaaggaaatatgtcatggagtaatgttaaaaaataatgatgttgttaataagtatattaaaaattagaaaaaatattaattttaagaagttattgccttcaaaaaataaaatactaccagttcaacaaaaatcaaaagcaagaaactaaatagttattttttgcttattgtcaattcatcaccccaaaggtcataatcaacaacttggacatctttatcatttctaggatgtttgaatacaagatacaagtgttattgagaactttttttattgaaaattttttttaatagagaaactctcaaaaatacttctaaatttggagttactgaccgtactgccacagtacaaaaatcatattaccggaatgccacaccaaggaaaaaaaataccaaagtgccacggtacctagttcgctagtcagaaaagcgaactaggtatgctgagatggcgcnnnnnnnnnnnnnnnnnnnnnnnnnnnnnnnnnnnnnnnnnnnnnnnnnnnnnnnnnnnnnnnnnnnnnnnnnnnnnnnnnnnnnnnnnnnnnnnnnnnnnnnnnnnnnnnnnnnnnnnnnnnnnnnnnnnnnnnnnnnnnnnnnnnnnnnnnnnnnnnnnnnnnnnnnnnnnnnnnnnnnnnnnnnnnnnnnnnnnnnnnnnnnnnnnnnnnnnnnnnnnnnnnnnnnnnnnnnnnnnnnnnnnnnnnnnnnnnnnnnnnnnnnnnnnnnnnnnnnnnnnnnnnnnnnnnnnnnnnnnnnnnnnnnnnnnnnnnnnnnnnnnnnnnnnnnnnnnnnnnnnnnnnnnnnnnnnnnnnnnnnnnnnnnnnnnnnnnnnnnnnnnnnnnnnnnnnnnnnnnnnnnnnnnnnnnnnnnnnnnnnnnnnnnnnnnnnnnnnnnnnnnnnnnnnnnnnnnnnnnnnnnnnnnnnnnnnnnnnnnnnnnnnnnnnnnnnnnnnnnnnnnnnnnnnnnnnnnnnnnnnnnnnnnnnnnnnnnnnnnnnnnnnnnnnnnnnnnnnnnnnnnnnnnnnnnnnnnnnnnnnnnnnnnnnnnnnnnnnnnnnnnnnnnnnnnnnnnnnnnnnnnnnnnnnnnnnnnnnnnnnnnnnnnnnnnnnnnnnnnnnnnnnnnnnnnnnnnnnnnnnnnnnnnnnnnnnnnnnnnnnnnnnnnnnnnnnnnnnnnnnnnnnnnnnnnnnnnnnnnnnnnnnnnnnnnnnnnnnnnnnnnnnnnnnnnnnnnnnnnnnnnnnnnnnnnnnnnnnnnnnnnnnnnnnnnnnnnnnnnnnnnnnnnnnnnnnnnnnnnnnnnnnnnnnnnnnnnnnnnnnnnnnnnnnnnnnnnnnnnnnnnnnnnnnnnnnnnnnnnnnnnnnnnnnnnnnnnnnnnnnnnnnnnnnnnnnnnnnnnnnnnnnnnnnnnnnnnnnnnnnnnnnnnnnnnnnnnnnnnnnnnnnnnnnnnnnnnnnnnnnnnnnnnnnnnnnnnnnnnnnnnnnnnnnnnnnnnnnnnnntaatatacaacggtgattaaaccattccctctattactcattttgcacaacaaaaatataactgaacactctctcaatcacagaaactctcactcagcaaacttacaatttcacacggtggggatatacaattttagcacctgcgcttcgattaagtagaggtcggggatgcctagttcgctacactgatagacaaactaggcagcctacctcgcttgaatatttgacgaactacctacttcgtcacctgcattagcaaactaggtagcttagttcgtcatcctctctggcaaactaggtgctgacgtggcagccttcacctagttcgtcgccccctctagcaaactaggtgctgacgtggctgacttacctagttcgtcaccccctctagcaaagtaggtgctgatgtgtcagacgctacctagttcgtcaccccttatggcaaactacgtgctgacgtgtccgaagcttgtcctagttcgtcatcatcagtagcgaacttgggctgcccgtcttgtgcccgttggccagagtggcgccatctcagcatacctagttcgcttttctgactagcgaactaggtaccgtggcactttggtattttttttccttggtgtggcattccggtaatatgatttttgtactgtggcagtacggtcagtaactccttttattcaaatatactcatactcttttactacacttgcaacttggacaaccaataattgattatgaaaaactaacacaaccggttgccatctacctattgcattgccatatttcaatccaactgtcaagattttttttgcatgctacgaaaaacattttgttttcgctccttagaatccgtcctcaaagaatattcggtcatcatgtttctaggaatcatgtgaacaattaatgaccccaacaaacaaggtggcaaatcctcttcagcatcgagcatatgcaagagttaacaagaaatcgaggtgagtgctaattgctagtattatcattcattaattggattattacaagattggataactgatttgaatatctactattgattcgtgttccatgaaattaggagatttaataacaaagcaacttccaaaacaaaactccatctataatgtgaacttgttattattttctcagttttgaaggcttctccttatatactggtacatatgagacaggaacatgaaatgacaataaatttaacatcaaacattgttttgcttcaacacggccacaggtcaccccaaatagatcttttggcctgttgatgcaaggtagggttcttgctccgagtgacgactatacggtcatatgaaccctctgaggcatcccttttggtggatctgcacacattcatagtgacctgtctaccccttctgacaggcatgaagacaatcctgccccagccacctccaagatcagcactgcctctttcttcttcactttcctcgtcctcttcactatcaatgggaccatcggtttccacagcatcatcagaatcataagttacagcatttactacttcacgaggagtgtcgtcagtttccaaatcatcagcaacgtcagtttctgcatcagctacttcgtgaggagtgtcatcagcttgttgcaacttcaaccagtcctctgaaaaagtgaaaagaaacaaacaataatgggaattaatagtttataatctcaaaggtcctctcctatataccatttaaaggaagatggttaaatagcaaatcagaccatatattttgttttaaagtattttagcagaaagtaagcattgaggcatgtaaactaagtaccgtagtcaatttcaagatcctctggatttcttttagcatgctgctccttcagagtctcaaattccataccatcaaggggccaaggttccctgtggtgcaagggatgggtaaaaaaacagttacaaaggatgaagcatctatacctcaaagaaaactacgtacctcattacctcaaagataatgacattcaatgaccagggtaggaaggattagaaagtgttgctttataaatagaaattgtgacttcaaaaaatcatccataacaaaaagaaatcaaaataaaaattaattggaaaatattaacatgagatacatgtccatcggcttgttatattttcacgaaaaaagacttttggcaattattttcgttaagagtttaacttagatatatcgtcagcgtaaagatttaccctgttaactatttagaaaaaaatcatcataaatatgacttttgaagtaattattacaaaaatcaacaattttatcacatgataatccatgattggacgattcacaatactataatttctttttacattgttagtgcattctaataaaatgatttttgttattctatttgttatctatattgctttaattcaaacataaactacgtacctcattacctggaggctccacactatgcgcaggtaaaggggagggatattgtacgcagccttacccttgcatatgcaaagaggctgtttccagattcgaacccatgaccaacaagtcaccaagacacaactttaccgctgtgccagggctcgccctactttagttcaaacatgaaagatgtaaataaaacacttgccttggccttgatcctcgtctaaaaacaacataggaaaatttctcatcttcaaatccacgtaaaggatcaccctttgaacgctgtaacgatgaaatttaacagtgaatttttttttatgtcgatcctcgttgatatcacagaaaagggtaaagtaggaatgtggggaaaacacgattctttccaatacaataagtaaaatacggattaaggagaaaccttgtaggcgcgttgtgaagatgtcctttccaaacgctgaacaaaatgacaatattttccagattttaccagtggacaagccccatcatgaggacactgcatgaagaaaatttaccaaaaaaactgaaaaggataagagtaggccaggcagaaattgaaggaaatgagtgcttggaaaagatgttgagtaaaaatgtaatatacttacaggagcaaccacaaaggcaccggtcttctcagtgatcaaatctttacaaacttcattattcttacgcgaagacttacggtttttctacaaaggcagcaaattccatgctttataagaataaaacatcgaaagaaaactgcacaactatgatgcctaaagacagaatacaaagataatttagcattgttcaattttttctcataagtggtcgtaaaattactctttcttccatccataatatgtgagatctcatctgagctataatattagatccatgaggtgttcctggttcaaccaaaacctacaagaattaaatttcagaaatagagataacattagatataagattcaaaagaattaaatattacaataaatttataaattcaaaggttcatttccttttaaagaaatttcttctatgattaacagacattttcgtttgctcctacaagtccttttcctctaataattactttgttttatttacattaaatgttaaaacaacaccaagctaaaatataagtaaaataattatttatagataatcctctctttcacagggcaataaaagtatgagctagaatcataccagaatgtcccgcgttagatcccaaagctggcgaactatggtaattcgatcctttattgatgggatctctccaagaacataggacttcagccaataaaacagattgctagcagttagcatcaactaaagaaataatacataaatactttatatgccctgaatttgaaaacataaaaatatctaattaaagcataaccctaccaacaatacagaaaaggaaaatagggctgtagaataaaataataaacttaacggacagaggaaatccagctgaactatgtaatttgttttaaccaaaaaattaaaaattggatggaaggaaaaattggccaaaatctgaatatatgaatcatatacaaatgtaaaattctgatctgaactcaaagaataaacttacagcaattacaaggtcatgccctctctctgatttactgatacttttagaaagtgattgaatgctatcatagctatgaataagtggcaaattcttgagacctatataatcaatagcagaaaaagaatcaaagttgccaaccattaaacgttttcaacttttctcaggaaattcagaagggaaagatttcaatatcaatcctaaacaggaaaattcactacataatttagtaaaacaaccctcattacacaagggaaaggactgttgattcagcggtgactgaaatgactttggcaccatcattagaaagaagtgtctcaatttcctaatgatgaaccaaacagagcaagacaggtcagactattgctttcataaactttaaaatcttctaatttcattggcaatcttctataacatgcaatttttctttcttttttgttttaataaactagtttgtttaagaataatgtcaaatgatgtggaatttggcaatccataaacaataagctttaagttgcagttgtgttccatgatttcaacataattgtaaatatacaactcaatgggtcctcttccctcttccattgcttcatatgtacattttaagtaaagtttttgctcttctagccttctaaaaacgaatatggtttaatcttactcgcctcattttgacagtattaagaaacctatcttgttcaaagaagtgtatcaacatttaccttgtataaggctctgacctgcacgctgcattgattgtgatggttctattaaattaactttctctaaagattttggccaaacttcttgcagtgccctacatcatcagatttgaaaggcaataaaaaagttcaaaaacatgaccaaaattataatatcaaagttaaccattcaaaagaataaagttcaagaatattttaccagaaagctgaacctgtccccgcaccaaaatctaataccttagatggggagaaaccaggaagccttctgcgaacctaaaaagagagttttgttgagattaacatcaagccaacattttattcaagactgaaaggcttttttctgggtattcataaaaataaaaagttaaatgagaataagtcaaagaaagatatggttcacaacaataacaatagctttatcccacatggatcccaccttatggaaactaaattataacgtatcctcaacctatatgatacaatttggaaaataaacagaaaaaaaaaaagatggacaagacacaccaatcccacatattagggatttcaatcattctgacgcattaattcaccctgtgtgattaaatttagacctaaaatcttttgcaacggttctcgcttccatatgcaaatctgctctcatctgactccatgactcaatctcataacagagtgcatttatcactaatcctttcatttgtgtcaacttaagcaacccattcccttgaagaaacacttccattagaattctaacgtttccttatattatcatggatggacacaaaaccattgttcacacgcgtcttttttcctttctgtttttgttctaacaggcttcatctatttattttgcaaacgaaaagattaataggtttttgttctaactcaaaaatccacttctcctagttatgtcaaagcttctaacaccaattatttaatattagagtaatataaaagagaggtgcagtattcaactgcacactcacttaactatgttaatcactgagttagttactcagttagttaagtgccagtgttagttaagagttggttagaaggttagttagtcataactaactgttctagagctctatatatacttctctttgtaacagaaaacagttacccaatcataataacattttctgattctaaactctaaagttcttctctcttttgctctttatctttcatcttcttcagttctgtcaagaactcttttgtttaatgatatactttcccttctttcattgatattttttcctttacttttcccttatttggattaaggttctgtcctacctctttaagtactctgtaacaagaagagtaaacagcaggcattcgagaagccacatatgcaattgtctcatcatctctatatgtgagaccaatgtccccataagagcttgtaatcttccaacgttttgattgttcaaaagggtcttcaactatcttctttgctgtggtggttgccagctggagattgacatccttgatttgattgaatgattgagacaatctcaagactttcctcttcatatatggctcctcctgctctataatcccaagagaaccatgaacaattggcatcacaaaaatacgaaaatataaagatatatattgcatataagaaaaaaaaattaagcaccaagaaaataaaagacctcgaaggtatttcttaatggcacggcggagacggacaggaacaacaaggcaacgcgcagattgtttggctgcatagcggagggtttcacgggtgacaattttctgggcagtttcagcaattgtctgggcagccatgctgacccagaatttaacaaaccactctttgtgttccaagtaatcaggttcctgtattactgtaacttagtaagttggcaacagttttaataaacaaaaaaataaaagcaaaatctcatctagctctagcctaggcaccacaaaaatgaaacatagctgagttaaaaccataacattttttcatgctaattcttttcatttcctgatttacatcttttctaaggaagaaaagaatgagacaaaccaaatatccataaaccaaacctgttctcacctaagcagctaattttcttcttcattctcttcagatgtttcaatttttttaaaaagcacagagatttggagtttagtctgaattaaatggatgcaatttttattataaaaataaacacagaaaaaatatcatatgaattcttcactccatgagccagccaaaaaaatttcctattactagaagagacgtgcaatcatcaagtgaatcttcaaaatacaaaaataacaatggtaaaacatcaagaatcagtccatacatacatcgttttcaaaacattatgactaacctattagcaatcatggtacattttggaattatgaaatgccataagaagtatagtatttgatcagctacaatacttgcaaccctgaaagtcttagaatgtggatttgggcctaactcaaccccaaaaactagctcatagggtgaaggttgccccctacttatatactctatattggccttatctctaaccaacgtgggacttggatttttcccaatacacccccttacgcccaacgcttttaggcttgatgcgtggatgacatggtgggtagcccatttagtggactaggatagactctgataccatcttagaatgtgagtttagatctaactcaaccacaaaagctagctcatggggtgagggttgtcccccacttatatatattctatctttgccttgactctggccgatttgagactttgattttttccaatacaccccctcacacccaacactttgggcttggtgcatggataatatggtaagtagcctgttaatgaatctaggataggctttgataccatcttagaatgtgggtttaggcctaactcaactccaaaagctaactcatggggtgagggttgccacctacttatatactctatattggcactatctctagtcgatgtgggacttggatttttcccaatataccccctcatgcccagcacttttgaactttgtgcgtagataacaaagtgggtaaccctttttaatggattcaggataggctctgtttccatcttagaatgtgggtttgggcctaactcaatatcaaaagctaactcatgggatgaggattgtcccccacttatatactctatattggccttatctctacccaatgtgggacttgggtttttctcaatagaaaggaagaaatacaagcactcaatgattaaggtgaaaaaatattaataacagacatatttttatcaatgttagcaatataaaggattaatccaacatagtagtcaatcttacattggggcatggagaggacgcccctaaaaacactataaccagatggccactattttttaacccaaaatccttaacatagatttatactacacatgtatatttactgcaaattaatagggaaaataaaaactaaaattaaagacattcataattaataatcaagagtttgatatagatttatactacacatgtatatttactgcaaattaatagggaaaataaaaactaaaattaaagacattcataattaataatcaagagtttgataactaaacacacatgccgttggatgaaatcattgtttttctcaaattcttttgtagagattgaagatgggacagagatgtaagagatgggtatacataaacaccacaaattggccagaaactgaccaaattcaaagaacagaggtgcagaaatggtgcaagaacgaaagcgatgagaatgaaaagggattcagattaataagttactgtaagggtttaacactatagttacacgcattgagtagagaagggaaagggtgttgaaacaggacctcaacctgaacattttcagaaccatacttaagcaaaatatatatacaaaaaatcttcattgagaaatttcatcacagtttatgagcaaaacgtgactaacttcttccttctttttcacttgttcaaagcatcgaaacttgatgtttttctctaagaacacaatagaaactaagcaaataaaggattgattaagcaattatggtaaacttcttaccttcaaattgtggtggatggaaggaaaaaaggttcatggtgcagctaggtgttccaaagagaaaacacgaacagtgatgaaaaccccttcttaaagccctctccgatactttatggaccgtcggatgcatccaacggtgaacgtttgttttttcttttttcattttttttctaaatgactttaaagtcgtaagaaaattttcaaagtatatataataccatgtccaggttaaacaacaaacacacttgtttaagttgtttctcaaagttgtcagtaacttaattagtattcacagtttctaagatagtgggttgtgccattttactaggcttagtatgttacaatataccctatttcaattaatgctttgctgttattttttgtattgaattctaattgtcattttttgtagtcttgtttaaaaagcagtagtacctatttcaattaatgctttgctgttattttttgtattgaattctaattgtcattattgaatatgaagtaacttgcaattgttagtattgagaaagcaaaccatttctgaatgttgctgtaagtcaattgaataccagatcaatatggcaatacatgacagcaactggaatgaaattggtttaaccaacatgcaatgaaaaatttgtaaccatttttaagcttttttatttgtgtcatgtagttcagttacataacagtgattttgttaggtgtccttcatccgtgactgataggtactttctattgttcaggttagttgtgtttttttattctacttgagtaaataatgttatttctatgtttctggttgtggttcaaaatagtatttattgtatcaaaaacataattaaagaaccaaaacttatgagcgtgcgtggttacacaatacaatcaatttaattgatagaaaactaatatgaagtttgacatggatatgcataacttaattaaaggaattatgtataaatgatagtatgttaagacaaaaaatgaggataaattggcaaagcagacaacagcaagtaatttactggttttcatagatgctgagaatacagaaacacaacaacatacccagaaagagagggagaagctaaaacatcatttcctgcttaacagttaattgatttatttttctaaatcatcagcaaattttcttacttttcattaccggccccttcatcatgatagaagatgaatttaaactaacacttttttcttctacataaattgtttttcataatattcaatatacatcaaattaagtctgtgcaatggaatcgaaatgacattaactctctttttcacattaactttttctaatcataaaaccactaaaaaaaagaagaaacccacatcaaatcaaacaaataaaaccattaaacacacaaaaacacagcatcatataaacaacgaatgaaattaacatttagcactatcaaaccaagcacctgagtttttcgcgcgcttgggcttgtgcttgttgacgaggggcttcttcacgtcatcggcggggtaaaacttgggcggcttctgggccggggcctcgggtttgggcttgttgggatcgtggcgggggaaaacgccgcctttttcgtctcctttttctgcttcttctgcttcttctgcttctgtgctgagactgaggctggtgacgcaaaaccctaagtctggtttatatttgcgcctgaaaacgcatcgggttgatgtttctattggccgggctttgtgaaaatattgtctgttttcctatttctattgctcacttttcttttttaactaacaaacaacatattcatgtgtcattctcattttttattttttacgtatttttaaactgcatttacttataaacataaaattttatataaaaacaaacataattagtatttacatttttttaaaatagagtaattaagcaaaaaaaaatcaactccatcctgattttgaagctacttaaaccattgtctgctataaaatatttgagaattgaatcattgtttatgctcttgtcttgtttccatgttaataaattttattataatatattaattatatatttatgtaaaaattcaacactattaaaattagtttattatatgatattattgagtatgtagtgttttgtataaaaatatatttatgaattaaaattaaaatatttattatataattatgtaaaatgatatttaaatttattatataactattaagtaacaaaaaaatctgtatatgaagatattaaacataaagacaaaatattattttgtgaaaaatatattaactatttatatttgaattaatttttaatatacaaattccaactgcataatataaatattattaaaaacatttatttatgaaattattgagtaaaaaaatttacgtgaatgataattgaggtttttatcataattaaaactatcttaatttatgactattgaatctttgttatgcacatgtgtaaaatacttaaagaaaaaacttgcttagtaagtaatttgaaattattttgtagtaaaattatatttaataaattaattattatataaatattatatatttatgtcaaaataattttttaagtaaaaacaattttataggattttcatcctataaacaaaggtccaacttattttttaaatcctcaacccccaaagattagaaactcatctatatatactgttaattgaaaatacaaaacaatatgggattgattgacctcatgtttgatgagttattgatatgaatgatcatgagttaaaaattatgaattgctctcattctagatagctgatactaatttttgtgttgtaaattgtttttccagagctgatggagattatggagcggcaaaggtgatgcttagacctgcttctcccggtattggggttattgcatgtgggtctatgaaaattgttctggaaatggcaggagttaagaatgctttgggaaagcaactagggaataataatgcactcaacaatgccagagcaactattgttgttgtgcagaaaatgaaatagtttcgtgaggttgttgaggagcatgggattttgtccttaccaaaatttaaaagagtcacgcgtaaggatagacgtggtccaggttgattccagactttatcagtcagacgatgagtcagtattgttaagaggggaacatgcaaaacaaaagagaggatcacgaagcttaagtaaatatatcaatattataaagagaaaagcatatagttaagagtagagatgaatgagcacactgtaaacgagtgattgtggtatgaattggatgtgtggaaaggttagatggaacttgtatttataggatgaacatgagtgccttgagcctttatagataattaacatgtagataagactaatagataattgcagattatagataattaagttacatataattcgtatcttgtaaataatttgtagcttgtaaatagttaggtacctattatttgaaaagttgttgctgcattatcaaataacatttgaataaatataagttagagataatctattagtagataattataccacgtgtatttttcatattttggacgatacagattccaatggaagaattgtggaagtaatgaaatttgtgaagggaatgtaatttttagatgttgatgtttgtgatatagagcgggtcatagttctctaaaggaagtgaaaacattgtccaatttttgttgaaagttttatgaaagtgaacagtttcttcaaaaagctacttgttcaggttgaattcagtatattatttatctatctgtttgatttgtatttatggtcgtccaatttatgctaggctaaatcaatgtcaatgactcaattgttcagttgcagaaggattgtgtgaatcttccaccattagagtgtttcctcatcacctttgattaaggaaccatgatgatttaaaaggcgtctcttttccaaacctatttgctccaccattattttctcaatggttgtttcctgttttcgtcaaggctcaaaatttgaaaagcttatatgcttatttttaggttttgattttgatatcaactgatgagattttgagttgatgagaaaattcaaggtaagaaaaaccattacttacataggataaattgattatatataattgagggtaaacatgtaataatctaaaattattttagatattgtatttttattaaggttaagtttttaagaattgttagataatttctattactattttatttttactaaacgggttctaatataaattataaaacgtatgaattatagaagttgttaaactaatatatattataagtagtcacagtccttgctacaaaaggcattattaaacaagtacaacattttcatacaccagcttagtccttctcttgttacatagtcaacattagagtactccaactactattatttatttacaaaatccacaactcctatcccttttttaaacattttctccagtgctatcctcttcactgatcacgattatgagatctgtggccgggttagaatacacaggaacaaattgtaagaaggggttgtgtggattaaactcctcactaaagacagagataggaaagtgagttccaaagtaaatgtgtgcacgcaggacgggctacatagttgtgacagcaatttttgacttcatatatatatcatgttatgtcaagtgagtcaaggaacaggatgattgatgccatctaaaataaaacatggaacaaatctagtgagaaataaaatttctcagtaggcaaaattaaaccaccaaacaagttagtacgttagtaaatcatcaatataaccaaataagtccatataagaaattatgcaactttatgaatgcatgaaatgaatttttccagggtgcatatggcctctacatatcgtactgtatgtagatacatctcgtactggatgtagacgttgtgatcgtcttacgcaaacacgggtgatttattccatgtaactgcagctggtcactatatatcatactatatgtagtatcaattttcgcttcacaaatctcgtattggatttggagaccggaacatatcatcacctcaaattccatcataacatcatatgtaccaaagtagggttaggctaccataccttataaaattataccaactcagacataatatttgattatcttcaagctacagaaaaatcatattactagcctaaataataaaccattatatatcttttaatttaaattttaagttagttaatttttatttttttttctgggatccggggtgttgtggccggggtccaagatgctgtggccggggtccagggtgttgtggtcgagatgcagtttaaaataataaaaatagctagaatatcatcagaatcacctccaaaaatcatcaaataaacttccaaatattactaatactttagcctataaatcatgacctatcatatggtttaaatcaacattttcacatcattaaatgaaatttcagcctaaataagagccataattctatatatttaagcatgtatattagttcaaatgaattcctaactaaggattgaagcctagcctaccttcaataagtctgatggactgaatagagaatttctagaataactttaaggtagaaagtttttacgtgaaagaaagaagaaatggaagtatataaaggtggtagaaaataaaggttttaatatgaaaagtgggggctgaaagttttcatgtagagattttctgaatgcaaggatatttatactagtttgtttagttgggttttaaatgagctaaatgagttataaccgagttaggattcagtttggttacaaagtaactaaccttaaagatatttatcctaagttaatcatgacaaatatttcttcatttatgggttgagggaacgtggaagttgctaaacaaatgaatttcttttgcctatatccatatgactgaaagtaaatgaagcaagattccttcattaatggcatgtgcacgtgaaagaatgcttaaagcttgattttgtttatttgttccccctaatgccacatggatatccctaaaagattattcaagaaatttggactcagcttgtctcattttatttactcattgattttaccttgactttagttgaccaaatattcacttagccaagcatatttgcatgactgttgtgaattttttagagtatttatgttcaaataaattttatatttttgtatccaaatattaatattatcataatcccataatttaatataaacttaaaatataattttttttaggatgttacaaaatacagttcatctaatctaccaaattacttttattgagaagtttcagatttacacgtttttggactacgagtattgagatcctcttcattatacattaaaccaaaacaactatagagtatttctcaaacatttcaagacagtgtccacataaatgctcccaatctcacgcattttataagaaaaagtcatttgctatttaggttctctaagcccatctcccacatttgatgttcaacctagactaaaccgatctgtgtaagaaacctttaggaaaaaaatacattcagtactgcaaaggaaaactactacagaaaattttaagttatagccaataactcactcataattagatgccaaaagaaaaccaatgcttttctagaatttacttatacataagccataatgatacaacgtgcatttcctttttattcttctctttgcaatcttcctcatgaagggaacacaaaatggcatgtggaatcacaatatgctgactaaatcatatatgcacctatgtgttcctttacatgctattgcaccatgaaaaactaaatagaatccatgaattataacatcaccaaatccatcacaaaacattttgcattgccatgtgaaatgccacacacacacacacttttataaaacaaaacacacacacaaacatacatacatgaaaaacttaactagaagatataagtttggcttggtggtaaaggatgaagggaggaagggatagatcacatgttcgaatcccgccgttacaaaaactaacaactaatatttgtccataaaaaaaaaatgaaaagcttaactcatgcaatgacaacacttctaatccaagttgtgtcatttaggaaccaacatggtcaaataaaatgtcacatcacattcacaaatcattagtacatagttgttacatgttcaattttagactccacaaggatgcaaactgcatagaaagcataaacaatgaacgaaatctcaatttaaatttgaaatcaatacaatttacaatgagtaagggtgaaagtactagctgagaagcaagaagagggtgaggcaaattagaacaaggaatgcaacatgaaaaatcaaccatgaatactggaaaagaatgctaaggccagcataacagcaagacagagacccaacaataaaaaagtggactttaaagtaatccatgtaggaccctgaatcaaaaacacaaaaacaaaaaaaaaaaaaaatcacaaaaatttaacgaaaaaagtgtaaactaaaagttaaaaatggaagaaatcgcagagtgaaaatacggacattaacaccaggagctaaagttccaaggagaattctgtgttccggttttccatcttgcaacggaaatttaagttagtcaattagggtttatagctgttgagccaaatctcaatttcccgctaaactcttattctaaatttctaccaggtttcgccttttagatttaaaaagaaggaaaaataatattttgggtagataattgactggacttcggacagtttgggtcaaaggaaaatgttatttatacctcattaatccttattatattaatatatatctttttagtctttgtttgggagagggattttagaggggaagggaaaggtttaggtggtgacatctttttgtttgggagttttaatttttgaggaaaatgatttgaggatttttaaaactcctctgaaatcctccaaagcctaaaaattgttgttcccccaatttgggggtttttagaaggaaaaataataaaattactatcctactccaaccagtgttaataaaattactatcatatcccagtcagtgttaataaaacaccaaaatacaaaatattgaatcacaattcaagaacaaaattgtaaaagtatcttattaactttccattttcttctcttaatatatttttaactctcaaacaaggaagaagaaacttccctcatttttctccctttccttcccgtttttcttgaatctctttcctttccttcccctcctaactcccaaataaagcctttatttattaggtatatttataattatctaaattctcaaattatgaacacttttaattgtgagtgtatataaggtaaatattttatttttaatatgattttttataaacaaaattaaaataaaaatcctaaattatttgattaagaaagaaaaactactgttttttttctcatgttatgttctttggtaaaaaaattgcctcttaaaaaatagtacagtatacagacgaataagacaaagtatttcaagtggagggaacagtgagaggggggagcgtgtgtcgactagccgtagtcactgttcaggaacacttgacccttggtagatggaatgggcatttttagctttactaaattcatattttccgtccgtttccaattcaatttaaatcataacatgataggtgatgggtctggatgactaccccaccaccatgaatgaatcttttcaacccaccatgaatgaataaatgaatcttcaaccccaatcatcctccttagttcctctatttcacttctttaccgtatgtatgccaataataaacaaataaaataatagataaatatagaatcatgatgagatcatgataacgggtcaatatttaaaatttcaaaagaagaagttcatattccagtctcaattaaatattaaataataatagtacaatagtacaatttaactatgtaatcaactttccacaaagaaaagacaatataatcaacgaaatacatcatacttttttttttaatagtggatgtaccctaccactatcgaattattattatttttaaaaacaattaaatcaattttactagcagcagatccagaaaactaagtgtgtgtttgaattataattaaaaaaaaatagaatttgattgaatttaattttgtaaacttaaatttagttaaaagtaagtttaatataatttgatttgtgttttaaattttttagcctcagtgcaaaaacaagatatgagtaattttggagtaaatcttagttttggtgaaagttgcattcaattcacctagaaaaataatttgtcaaacaagtagatataaatttttatgagagataaaccttaatttggatgtccaaacacgaaccaaacacacccttgaaattaagaaagctagttattgttataggaaaaaggacaactttacttccaatcaaattcttaagtaaaacaataataaatatataaggagnnnnnnnnnnnnnnnnnnnnnnnnnnnnnnnnnnnnnnnnatacaaaaattatatataaatttgttactaaaatcaaggggtgcatttttacaccctcgactctatataggtttgtcactaaattttaccttgacattcatatcacaaatcattatatatgataaatttgttaatatttataataaaataaatgttaactagtgacattagatatcctaagggtattggttttaaaaaattaaaggataaatatttttattgagataaaaaaatttgttgacatttttctcttttaatttgttaattattatcctaaaaatattagttaacaaaactcttatgataaaaaaaatgatttttaaacacccaagagatatatagataccttgagagagataaaaagaggaaagaaataagtgattaataagattaatgatataataatagaaaaagatttaaaaataaaaatattaattaaatatttataaaattcaaatatcaccattcttataataataataataataataataataataataataataataataataataatagttatgttaaaagttcctagccatgattcatgattaataaacattcttacagtaacaatacatatgattagtgtctgtttttcattgtttggtttaagataatttcattttcaatgcaccttcaacataactttcacacaacaactctttttaaagtttaacatgcagtagcttaaaccgcaaactaacccacgttacttttttcccaacactgttggcgtgggtccagtatttccacggtattgtgtaataggattttttttctacactattcaaaaatcaaatacattaaataataataatgtaatttcaaaattatcctttataattccatatagattaaacaatttttcttttttctttttttttctatgtaaacccatatagattaaacaatttgtatgtcttatatgaattaatcaatctgtatctttataattcgtatgagtcatatggattgatcaatccatatactttatatgaaagatttctaccactacaacacccactacgataacaacaatgaaacaaaacaattatcaaatcacgaccaatcacgagagaaggatgtatgccaagaacaaacgaagtacaaggacgaagaagcaaaaatgaggtgagaaaggataactttgaaattaaaaaaatgaattatatatgaaagatttgaaggcaaatttaataaaataatacaaattaattaaataattaaaaaaatggggttgttttgaaacaaattaggaaaatggggtcacccaacacgcctaaaataggcgtgtttaaacacgcctaaattgggcgtgtttaaacacgcctattttgggcgtgtttgagttgattcccatctataaaaagctaaaaaaaatttactttttaccatttgtgcatgttgaggcttgggtgaaaaaatttgacttgggagtttggggagattgttcttgcagcgaaactctatcaacaagtaagtggattttaataattgagcattttttaatttaattgttagcgtgatacattatatgttttatgctgtatatgttaggaatttacatggtaggttattaaaatgttaggttcgtatgtgataggaataaaattattaggttcgttcatgttagtgttaggtatttacatggtaggtttgatgctgtagttttaatgattcgtaggtttagggtttagggtttaggacgtagggcttagggtttagggctcagggcttggggcttggggcttagggcttaggttttacggtaagggttttgattccgcaatagccatggctagttcacgaagttatcagaaatggcactagcaggggcaaacgataacccgtggctttattcgactcacgaagttatcaaaagtcactaattcctcgagaagagggtcagcgtgatttcctggataattgattagggtgtataggtttatggtttagggttaacgatttactgttgtaagtcatgaagctcaagatcttgctccttcatgtccttagtatgaactgattgagcttgttaatccgtagcatgaactgattgaactcattcatttcacctaagtattatttaagcctttgtgggctctacccacatagttttagggtttatgtttgagtgattatggtttaggattggtagttatgtacattaggtttaattaatttgaaatgataattatttgtaatgtgtggtcaaccgaagtaaaattttgtttaactttaattttgatttatttatattaagatagttgttagatggctgactcatcttcgagtgattcttcgcgctctggatccgatcatgagggtgagcccatggatctgacgacacatgtcattcctaccccgtataagtggggtgtcctgcgtaggcggactcagcggacccacgtttcacaggctgtgtggaacgaggacaaagttcgcctgctgaagactcgacgcggtaaagcgagggggggccacagcatgacgatatacctgacatcgtcagtgatatgttaggacgtgccggctttccacatgtcgcacgtatgcaatttattcaggtatgcaagttcgaaaataataaagtcaacacatatttttaacattaatgcatataaattgatttgttttttttttttaaagattgatcctgcgctgattagtgctctggttgagcggtggagaccagagacccatacattccacatgccgcagggcgaaatgacgatcacgttggaagacatggcaggtattttggggttgcccaccgagggcaaagtcgtcacaggggtcacggtcgcggattgggagaccgtgattgaggatgtcttcggtcacgaacctgatgcagacacggaacttaaaggtggatatttgcgtatgtctttctttgatagacacttcgccttttggggtcaggttcataacgatttgatcgatgtgtcgcgatttgctaaggcccgcattgcacgtctgattggatgatggctgctgagcgacagatccggggggagcatggttgcggcccgttacatcccattgcttgctggggacttcgacgacattggagcatatagctggggatctgcggtgcttgcacatttgtttaggcaaatgtgcgagtgcacagatccaagcaggagtgacattggtgggtgtcacatgttacttcaggcgtgggcatggctcaggttcccccccattggtcctgaaccaagttgtcaaccaagaagacatcatccacaaactgataaggattttgacgaacatgtaaagcagctgctgcggcatgactacatgggtatttgaaggccttgaacttgccacactgacaagaacgctcagcaaggttcacagaatataccatatcccaaccctcttccacctgaaatatagtttgttcaagattatatgtgcctacatggtggcctgtagcaagggtttggttatgcctcatagcttcaaccacatttttgcaatgtcgctgcgaatgttgaagctgtgaaacggcagcctgacctctgcatacaaaataattaaccaaacgggtgtacgtgtgattcacaagagtggtgataggcatgttccttgctcccttgaacaccctgttcactgattctgacaaatttgttgtcatatgaccatatcgtctcccctctgcatcatatgctcgtgtccatttttccttagggatgccatcaatccattctgcaacctcaggactagtatcacgaaaccgttcaaatgcggcgtcaaaatcaactacattgagagtataacctgcaaaataaataaacaaattaacactggaggccttcttaaagcaaaggtggttgaaatattaacgtttacagatatttattaggttgatgtagttgaaatatttgttgacatacctaaagtcataagggccttcttcaatcttgcactcttgaacctttgattaaaattactggcaatatgatgaaggcaaaacacgtgatgcgcataaggtggttgccaaccagcatgattttccacagcagaaatgatgctccggtgccgatctgaaatgagacatatattttgcatttgggtaacgtggaggcgaatgttagcaaggaagtattcccaagcttccagtgtctcccattcgacaatggcaaatgccaatggaagacactcattatttccgtcctgattcgtggcaatcaacaatttgcctttatacttgccatataaatgagttccatcaatttggatgatgggtttgcaaaatttaaaagcctcgcaacactgcctaaaagtccaaaacatgcgatgaaatacatgctttccctgtaccagccggtttgccacaaaataagcatttgtttgaatatcataaaaagaacctggtgaaaaacgaagcatgtagtcgcactacctcggcaaaaatgcatacgactcttcccaatccccataaatcatagccattgctttctgcttcgcatactaggtctttgcatatgaaactttaaatccataggtattggtgatcctctcctgcaccaatgcaattgacacagacggttcctccctaaccattcctgaaaatcaaatggaaacattgacatttacaacatacctctaaaaacaatatttttcataataaccaaattgtatagaaacataactactacaagtgaagcaatgatatcaacatcaagttgtctatgatcctgtgatatacggtcactgaggcaattgtgtttctcaccccatcttgaaacaacccacttctcaccgtaggttggtttgattaccttaaccctccaagggcaaccatcgatgtgtcgaacacacttcatgctaaacttggtaggcttgctctcaaccacagttgcttcttgatgatccttcatgaggttccgcttaattgcaatttgggcatccattttttattcaaattcctgcttaacaaacaagtcatcccctaattgccaaggaccttgcactgaacctgaacccgaacccgaacccgaagcagacccggtaaatgattcgtcttcgtcgcatggatgactccaatcaatatatgtgtaatctggaattccatgccaaaatggaatgaccccagcacctaaacattataagccaaataaaatacaattatatcacgaaggcaagcatgaaaccccgattaaataaatttcaacttatctatcccaaaccactaaaaacgtattcaaaatgattatgtacgatcattttaagatctgcaaccgctcccttatgtaattgagcaaggccaactactaaaaccctaaaccataaatccctaatccctaacccctaaagctaaccattatcgacccaaacaccctaaaaccttaaccctagaccatccaacatccaccctaacccctaaaccagaaacccaaatccttaaccctgaacaattattataagcaacataaaccctaaaccatccaacatccaccctaaaccatcatcgacccaacaccataaaaccttaaccctaaaccatccacaatccaccataacccctaaaccagaaacccaaatccttaaccctgaacaattattataagcaacataaaccctaaaccataaaacatcaacactaaacaacaactacatattatgatcattaacaagtaaacatatatctctacaatttcactgattaaagcagtctaacataccttcaacaggttcctctacttgatgacgcctttgagacgaccccacaacagtgtcttcttggaattcagtcgcatgcacgccatcatcctcatgattatccgacgcactagcatcctcctcaagaagacgatcttccatcgcgatatcttcatcatcgtcatccctcatcgtcctcatccataacccacgttgggtcatgttcagcttcctctgacacatttatagttggagcagcatatgaaccaccatatacagctggagcaggaaatgatgcttcattatttgcagaattaaaagctgctgacctcatggctaacgacaaaacatcatcctccactgcgacataatccacgtacaattctaacaattcattcattgactgcttcacatattgctcgattacaatttctaaatcttcatcatccagcagttgactccccgtgtaatgatcgtgttgccataatcttgccgtcaccaaattgatacgttggttgtcgtttaaatgtatttttttgcgtatcttctcatgtaattcactgagcgttgatcttcgattgatacgtgtcgacctattatccccttcaaaataacgccctgtcgacctctaacttttcttccattaaaaaataacataacatcaatactctgactacctgaactcatatttggaggactcttaaactagaaccaaaccaatggatcaaaccctaaacaactgaaccaatgcatctgcaccagggttttggccaacttatataggcataagggattcgaacacgcccaaaatagatgtgtttaaatatgcccaatttaagcgtgtttaaatatgcctattttaaacgtgttcaacaatcccaatttttttaataatttaattgatttgtattattttattaaatttgccgagatttgaacggtgtaggaagaaatttcctaataataactaataactgacccagaaaaccatccttgttgtattatataagggccaaagcttcccacaaatacacgcatataatcatttatgagataagacattccattcactcaagtgagaaaaaaaaagtaacaaaaataaacacctaaacatatcagaacaaagcaacaaccatggtgattcacagactcgaattgtgcataaccatggttcgactcgccatagagttcgtcgtgagcgtcgcggaaacagtggtcatagttcaacagagaaccgctgagcctctcggaacgttgaatcgcgcaagtacacctcttcctttctatggctacctccgttgagttgaagaatatctcttagtttctagctttcttttcttttcttctgtgaaattccgcaatttgtatagaccctatattttcttttcttttttggtgcatcaaacgcttattgatgcaaacccacnnnccctttttttttttttttttttctggattttggctggacttcttgtattcgttgaatccagattccttttctgcttataatggatgacttaggttaaagatgtgatttttcttttctttcttttattttatgagtctggttgagataccacggtgtcctccaacttactagattggagattaattcgcttatggtactatttttcattggttcaattttttttatacagaagacaaaatagaatacaagttttttcagtaaatagattgtcaacataattctatgagttcttttcatttcttcaactcatgttattctttttctggcccttaattgttaaatcttgaggttttttctctcttcatatttatacaatttttattatttgtttagtctaatgaaaaataaaatatgctctttttttctttcttggtgaatgaaatttgaatttttcccaaggaaaaatcactttattttcctgttattttctcacccttttattttttaataaataaagtctcagtctttaaagttcgtttaggtcaaaaaatttgtctaattgtgtgtaattagccttataaagagttatgagtttcttcccaagagtgctgtgaacactctgtttgtctctgttcttcaagcatggtggttttttatggttacattcaagcatggtggtttggtttctggtttatgtttatttggttggaccatttctgatgaattctgggaatggttattgaaactttgaaaatcggtttcatcaaaagcgtaagaaccaaggaaaatggtagttgaaacttgaaacatcttttaccggatcaaaaactctcctaattaataaattgcagtttcagtgtttcagtacgccgaaagttctgttggtcatgtctcacattcaatataaattaatagtactagtattttcttccgtctcaaatacnnnnnnnnnnnnnnnnnnnnnnnnnnnnnnnnnnnnnnnnnnnnnnnnnnnnnnnnnnnnnnnnnnnnnnnnnnnnnnnnnnnnnnnnnnnnnnnnnnnnnnnnnnnnnnnnnnnnnnnnnnnnnnnnnnnnnnnnnnnnnnnnnnnnnnnnnnnnnnnnnnnnnnnnnnnnnnnnnnnnnnnnnnnnnnnnnnnnnnnnnnnnnnnnnnnnnnnnnnnnnnnnnnnnnnnnnnnnnnnnnnnnnnnnnnnnnnnnnnnnnnnnnnnnnnnnnnnnnnnnnnnnnnnnnnnnnnnnnnnnnnnnnnnnnnnnnnnnnnnnnnnnngatctctcgaaggatcaaagcacaaaaatctatataaagtctgaagatgttcgtgttaaggttttcaaatcacaaagagaatattctgagacaaaacgaacaagtgttgtaacactgtcagtccattagacaaaagaaacttaagcgaattgagtgaatgtaagctctgcttagtcaacaagtttcattgtattcgagcctattgtttaaacactatgcttacaagttccatcaaacatatattgtttgtgaaagccaggattggtttagtgaaaaaaaaaaatgcttgagtcataagctcagggggagattaatgtattgccaggagtgtcctagagagtactcgtcatagccaaaagtgacataaagaatacttggttgtaaaaaaaaattgattagtggaatccttcgaggtttgaaggaaaattgaacgaaactcaaaagttaagatgaaccagtataaaatctttgtgttttcattattgcttctatatagctaattcttttctttaagccacttatacactatcttatccaagttttgtgaactggttttctaagcaaagtaatttcgaaccccttagacaaaaccgtttgtccattgatatttgtttgagaaaagtttttaatagttttcgaaagattaagttttatttttcatactattcaacctccttctagtatacttaattgacgactatgatttaaaataaaagttttaatacatcaaagactcaaaacaataaattttttattaggaattcataataaaatttaatatttatttacgaaaggtcttaaagatatttaagagaaaaagaatattagttcttggcccgcaaaatgtccggctcttcctcccgtggccaactttgtcttttcctcatcnnnnnnnnnnaatactttatgtaaaaaaaaaaagtaaaaacaaaacgaaaaataactataatgagtgattttctatgtatataacaccaatactaaagtaaaaaaaaatgttgaatgcttgcaatcttaaatttacataggggtttattctatctttattttttaagtggatttattctatttaaaaaactatcaaggatctaattcacttaatttactaagatgtgtgagtattgtaatttttttatatcgtctttgatttctattcctattgataaggaaaagtctatttgataattttttattgttatttttgtcttctctcctttgaaacgggaagagacttgttgatgcatcaaattacagcaaatatttatgaaaaaacaaatataatgacgaagggcaaacccatgattgttgcctctgtttccgtcatagcatggagtctgttttgtctgtttatttcacagcaaacatcgcccatgcctttttgtttaataatctactgtacaataataacaacgataaatggaacattttcatgtggtgtccacttttttgttaaactatcttgttctttaacttttctgtcaaaaaaatcttgttctttaacttttgtagaaaaaaaatcgtattctttaactactttaaaaaaaccagttattagtctctcttagattcccttagtaaagataaaaattacagtgatttttttccttcaagataaaaactgttaatatgaacattaaattatatcaaaagattaaattatttttaaacaaaatatgacttattagttttacagttgttattattgaaaggattttctatgattaaaatgatttaaatcttattttaatcagtaatattataagattaattaaataatttgattttgagaatgaaatgttaaacttatttaattgtaaagttctaaataataatttcaaaactcaaaaaccgaaaattaacatgaagtttgataatttatacaatactgcattacgttttcctaataattttatctaagatttgaaatttctaggtacgatgtggaattaaataatatttatatttttatataataattactattttgataaaatatttttaaaatttccattttttaattgccaacgttagtatttgtcgaatattaattggaagctccacattattgcggaaaacattatcagacattctccgggaccataggcagagaccctccactctcagtagtaatccctcctttcgaagacaacaataccccaaacagatgagccaatatgtcacactaacaattttgtaatttgtgagtaatttacaaatactagtactccttttggaaaagaacatataatatattattttattttacaaaaaaatatgctccaattatgaaatattcttcttcagtcgttagatgagtttcttttacagttgacataaattaatttatttaagttatatatatatatatatataattttgagcctttatttcttttaaaaaatatcctacttttctctagagtagatatgggttgggatcaacccaataacttatttgactaacatgaagtaaattgaataataaaatgagtcgatttatcaataatcaattgatacaaatagtaatgatttgtatttcttaatcaagtggtccatgattaaaaaaatgagttgattcgaataatggattcatgttttataattataattctaatgacctttgacattaatgatgaaatttaaataacttgaaccaacctgacgtgcaccacctctcttttctctatgtttgttcttggtgggtcaatgcagattgatacaagtggttaaggatccgaaatgaattttcactttttcatgggtgtggttcaaattgtcatgacgtcacttttctcgcttggtggacaatgttgagtctggctgcgtggactataccaaacaattatattcctaaagttttgatgttaacaaaatataaattttatatactaaccattcatgcttaagttacaaatgattttatctttatgagatacaaacataaaagcacgaacagaaagggtttggacaataggcaaagtatcagtcacctatacaattttagtcctaagaagacaagtgcttttgcacttggctcacaatgcaaaagcaatggaacagttgttcgatcctcaaaaattgaaaacaatcacaagaaactaacgtccatatatttagtaagaaacttgtgccaaagcgcacaaatggaaagatttaaattgtcttgtcttaacacttttaattccttttatcttatattgttaacgtttcttttgattcatacgacgaaagtcggctttgagcattaggtgacactaacaaaatgtacttctttgaacacatgttgcagaaagcatttggggcccccactctttctctatgcacaacagtagcctcgtgtcaaacgccaaagctattagataacggctagctaggatctctcgaaggatcaaagcacaaaaatctatataaagtctgaagatgttcgtgttaaggttttcaaatcacaaagagaatattctgagacaaaacgaacaagtgttgtaacactgtcagtccattagacaaaagaaacttaagcgaattgagtgaatgtaagctctgcttagtcaacaagtttcattgtattcgagcctattgtttaaacactatgcttacaagttccatcaaacatatattgtttgtgaaagccaggattggtttagtgaaaaaaaaaaatgcttgagtcataagctcagggggagattaatgtattgccaggagtgtcctagagagtactcgtcatagccaaaagtgacataaagaatacttggttgtaaaaaaaaattgattagtggaatccttcgaggtttgaaggaaaattgaacgaaactcaaaagttaagatgaaccagtataaaatctttgtgttttcattattgcttctatatagctaattcttttctttaagccacttatacactatcttatccaagttttgtgaactggttttctaagcaaagtaatttcgaaccccttagacaaaaccgtttgtccattgatatttgtttgagaaaagtttttaatagttttcgaaagattaagttttatttttcatactattcaacctccttctagtatacttaattgacgactatgatttaaaataaaagttttaatacatcaaagactcaaaacaataaattttttattaggaattcataataaaatttaatatttatttacgaaaggtcttaaagatatttaagagaaaaagaatattagttcttggcccgcaaaatgtccggctcttcctcccgtggccaactttgtcttttcctcat

(The sequence listing continues in the following parts.)

1-26. (canceled)

27. A method of producing a Glycine plant having increased resistance to Asian soybean rust (ASR), the method comprising the steps of:
a) crossing a Glycine max plant with a ASR resistant Glycine tomentella plant comprising in its genome a chromosomal interval corresponding to any one of SEQ ID NOs: 1-3 or a portion thereof;
b) generating soybean pods from the cross of a);
c) isolating embryos from the pods of b) and placing said embryos onto embryo rescue medium, wherein there is no callus induction;
d) transferring the embryos of c) onto germination medium or elongation medium and collecting shoots from said embryos;
e) growing the collected shoots of d) on germination or elongation medium; and
f) transferring established shoots of e) to soil, thereby producing a Glycine plant having increased resistance to ASR.

28-29. (canceled)

30. The method of claim 27, wherein the chromosomal interval is obtainable from any one of Glycine tomentella accession lines PI446958, PI509501, PI499939, PI583970, PI483224, or a progeny thereof or a amphidiploid hybrid.

31. (canceled)

32. The method of claim 27, further comprising the step of molecular marker selection, wherein an isolated genomic nucleic acid from the embryo of c) or the shoot or resultant plant of f) are analyzed for the presence of an allele that associates with increased ASR resistance and is closely linked with or located within the chromosome interval corresponding to any one of SEQ ID NOs: 1-3 or the portion thereof.

33. The method of claim 32, wherein the allele that associates with increased ASR resistance corresponds to any one of the favorable alleles listed in any one of Tables 1-3.

34. The method of claim 27, wherein the Glycine max plant of a) has a relative maturity of 3.7 to 4.8.

35. The method of claim 27, wherein the Glycine max plant of a) is used as a female plant and said Glycine tomentella plant is used as a pollen donor.

36. The method of claim 27, wherein the pods of b) are treated with a hormone mixture comprising GA3, NAA and Kinetin and are collected prior to 19 days after pollination.

37. (canceled)

38. The method of claim 27, wherein the embryos and/or shoots are treated with a chromosome doubling agent in any one of steps e)-h) to create amphidiploid plants capable of being backcrossed with a domestic annual Glycine cultivar to produce at least one backcross generation (BC1), wherein the chromosome doubling agent is either colchicine or trifluralin.

39-42. (canceled)

43. A method of producing a Glycine max plant having increased resistance to Asian soybean rust (ASR), the method comprising the steps of:
a) providing a first Glycine max plant comprising in its genome a chromosomal interval corresponding to any one of SEQ ID NOs: 1-3, wherein said first Glycine max plant has increased resistance to ASR;
b) crossing the Glycine max plant of a) with a second Glycine max plant not comprising said chromosomal interval; and
c) selecting a progeny plant from the cross of b) by isolating a nucleic acid from said progeny plant and detecting within said nucleic acid an allele that associates with increased ASR resistance and further wherein said allele is closely linked with or located within the chromosome intervals corresponding to any one of SEQ ID NOs: 1-3, thereby producing a Glycine max plant having increased resistance to ASR; and
d) backcrossing the progeny plant for one or more generations.

44. The method of claim 43, wherein the allele corresponds to any of the favorable alleles as depicted in any one of Tables 1-3.

45. The method of claim 43, wherein the either first or second Glycine max plant is an elite Glycine max plant.

46. (canceled)

47. The method of claim 43, wherein the chromosomal interval is obtainable from chromosome 20 of any one of Glycine tomentella accessions PI499939, PI446958, PI509501, PI583970, PI483224, or a progeny thereof.

48-49. (canceled)

50. A method of producing a Glycine max plant with increased ASR resistance, the method comprising the steps of:
a) isolating a nucleic acid from a Glycine max plant;
b) detecting in the nucleic acid of a) at least one molecular marker associated with increased ASR wherein said molecular marker is located within a chromosomal interval comprising any one of SEQ ID NOs: 1-3, or a portion thereof, wherein said portion confers to a plant increased ASR resistance, and wherein the molecular marker is located within 20 cM, 10 cM, 5 cM, 1 cM or 0.5 cM of a favorable allele as depicted in any one of Tables 1-3;
c) selecting a plant based on the presence of the molecular marker detected in b); and
d) producing a Glycine max progeny plant from the plant of c) identified as having said allele associated with increased ASR resistance.

51. (canceled)

52. A method of identifying or selecting a Glycine max plant having increased ASR resistance, the method comprising the steps of a. isolating a nucleic acid from a Glycine max plant; b. detecting in the nucleic acid the presence of a molecular marker that associates with increased ASR resistance wherein the molecular marker is located within 20 cM, 10 cM, 5 cM, 1 cM, or 0.5 cM of any favorable marker as described in any one of Tables 1-3; and c. identifying or selecting a Glycine max plant having increased ASR resistance on the basis of the molecular marker detected in b).

53-54. (canceled)

55. The method of claim 52, wherein the detecting comprises amplifying a marker locus or a portion of the marker locus and detecting the resulting amplified marker amplicon, wherein the amplifying comprises: a) admixing an amplification primer or amplification primer pair with a nucleic acid isolated from the first Glycine max plant or germplasm, wherein the primer or primer pair is complementary or partially complementary to at least a portion of the marker locus, and is capable of initiating DNA polymerization by a DNA polymerase using the Glycine max nucleic acid as a template; and, b) extending the primer or primer pair in a DNA polymerization reaction comprising a DNA polymerase and a template nucleic acid to generate at least one amplicon.

56-90. (canceled)
